United States Patent Application Publication US 2025/0051766 A1 - sequence listing, part 18

SEQ ID NO: 5065 - DNA, 58617616 bp, Homo sapiens (residues 34,736,369-36,907,391 of 58,617,616)
  source 1..58617616: mol_type = genomic DNA
agctatgattatgtcactgcactccagcctggcggcagagcaagaaaaaagtaacagctaaagtgaactaatgccaaaatcattcattggttcatcttctaaacacttaggaagtatctgttaggaaaagttgtacatggattttggtgtacactgacacacaggacttcatgatctagtgcagtattgtctaagagaactttctgcagtggtggaagtgctctgcatgtgtactggtcagtacagtagccaccagccctgtatgactattgagtacttgaactgtggcttaagcaactgagaaactgaattttaaactttacttattttatttttacattttaattaatttaaatgtatgtagccaaattgcctagtggctactgtattgaggattgcagcactggtagaaaagtaagaaagcataagaaattaaaataaatgccaggacagataggctatgttcttttggggacagagatgagtgaacaccccaggctgcccagacaactgaaggggaagaaggaagcatccctggctctaacttgtaataacctgttcatcataaagctatgagaaatgtttttttgatttgggataaagggaattaactaacacagtggcaactccaattaacaggtgaatttaggataaattatgtgtagcaaattgaactgtaaggtcttacttgattatttggaaaatgtatgtattggattgtatctgcttggctataaaaaagagatttcttcctgtccttttaatctcattagtggattgcctgtgaagtgcatcacagttgatttagtgattattaagtaataaaactgtgttctttttttctacatttgtggagaggattttctgccattggcaggagatttgaattttaattattttcccaacacctggcaaaaataaattctgcctttaaaaccaaagacgagtatcactggtgaacatgcatgcaaaatatccaaataatgtaatacaatgctgaattaactctcagagctaaaaaattaccacaggcaagcagtctgtttcacaaatcaaagacagtaataatgctgtattaaatagatgtattttttgtacatattataatttgactagccaataaactattattgaatatttaagcttccaaagttttactaaaaagtaatattgtgaaatgagtactattgaaaggaatttctaagccacatctgtgaacatttccttattttctttgaaacgtacccctttatttttttccctttactttcaggtcttatttaaggactatctaaggcagtggtgcccaacctttttggcaccagggatcggttttgtggaagacagtttttccacagaagcaggaggtggtggtttgggggtgaaactgtttcacctcagatcatcaggcattagttcaattcacataaggggcgtgcaaccttaatcccttgcatgcgcacttcacagtagggattgcgctcctatgagagtctaatgccatagctgatctgacaggaggcagggctcaggtgataaaagtcatttgcctgccactcatctcctgctctgtggcctgatttctaacaggccacagactggtaccagtggttatgtacccctaaccatcaggggattagggacccctgatctatggcatgaaaccatccttcagtcttttcacccaggggtctcatattttaataattgtctatcagtacaaagtttaagtatacaccataaatatatttttcttttttgtttatgaatcagttatgtgtatattttagtccattggtgctgctataacagaataccacagactgagtaatagaaattgacttctcatggttttggagcctgggaagtccaagatcaaggggcaggcatccagcaagggccttcttgctgtgtccttttatggtggaagggcgaagagaagagagagaaccaaaaaggggcccaaactcattttttaaataaggaagtcactcctaatgatgatgacattaatccattcatgagggcagagccctcaaggcctaatcatctcctaaggtctcacctctcaaaactgttacagcggcgattaagttcaatacacgcgttttgggggtcacaatcaaaccataacagtgtatgtctattagtctttaatataaaggttttttttttgtttttgtttttttttttgagacagagtcttgttctattacccaggctggagtgcagtggcgcaacctccgcctcttgggttcaagccattctcctgcctcagcctcccaagtagttgggattacaggtgtgagccaccacacccagctgcccattttttgtgagccttagtggatcatcctgagtatcccatttgagagacaatcactttaccctcattttttaattacttacctagcagttaagctgtaaaagatataactaaatacttgactctgtgctgtcaaatgtcaaatgctgatttttaaaaattcatgtatttctgtaacttttagcaaaattaactctactgaagcaaagctctcatatttgtttctcacctttattgtataataattctaagcacataactgtcccccttattgtatagtaattccaactacataactgtcctattattacttaactgagatcacattcccaatcattgccacaactcctgaatcttgttccatttctcccacaaccaggctaattttaccctttcttcagtgacagaagaggcctgggctatggctgagcctaaatatgtttgctatttcaggtgacatttaatgatgtggctatagacttcactcatgaagagtggggatggctcagttctgctcagagggacttatacaaggatgtgatggtccagaattatgagaacctggtctctgtaggtaaggatattaccccttccactccagtaggggacacctttcttttgccaccctgaattgctggagaccctcctaagtaaatggctgaatttctgtagcatgttcccaaggaaatgtgcagctctgttgtgccctgcctgaagcttatctttccatttcgatgaatacccttcatcccttcctgtggtccctcttgtgatggcctctcataatagaggaccacggcttaaacaattctgtattcttcctgtaagcaggtctttctgtaactaagccatatgtgatcacgttattggaggatggaaaagagccctggatgatggagaaaaaactgtcaaaaggtatgattccaggtgagtcatggtgaacgagacaaaggaagattttgttaaaaagggtcccaaactctttatagtgagtttatagtgagtgtggaggcattttaggtatactgttttcaaagatctcagatagaaatgaaaaattgtgggatatttagcttagattttcaaaacaattgttcctctatcccaaattattatctgtatcactcatgtcatccaatcaaggttagaggtttttgccttcataataattcaattgttactctattcataacagtaaggcaaattattctttcttaaatctacttaaagaaaaacatactgatagttttaggctaagaaaagctgtcaattagatgggaaatcacttttctaaagctgagcgttgtagatgaaatatgaacatattagaggaaaaaatgaacatatataaatatgtttctaggaatattttctaatgtccaataaatgacatgattcacacagtttcttcataacttcagaaagcctaaatctttgtcagctataaagagcatttagattattgtgtttttactgcaactgtttaataacatcaattctgtattttaagcatgttaatctggcagcaaattgagattaattgaatgttggagaaaaaggctatgagacaaaatgcaatctttcatacatgcatataggcacaaaatgatggcttggaatccagaatgccttccacattttatttctgataacttcctttttttccatactatttcatccattacatatatttttcccatttccattatcacactgtgttcccacttctgtgaactctgtattctctgctccatttgagcactgttcagaaatcattgaaatatttcagttgtcagaactatgtgttttctgggggcttcatttctaatccagttctcctaattccaatttagaagtttcttttcaaatagttaaaaaaaaacaaaacagtgctttgcttttttgatgtatttcagattgggaatcaagatgggaaaacaaggaattatcaacaaagaaggataattatgatgaagattcaccccaaacagtaataatagaaaaagttgtaaaacaaagttatgaattttcaaattctaagaagaatttggaatatatagagaagttggaagggaagcatggaagtcaggtagaccatttcagaccagcaattctcacctctagagaaagccccactgcagacagtgtttacaaatacaatatatttagaagcacctttcattcaaagtctactctttctgaaccacaaaaaatttctgctgaagggaattcacacaaatatgatatattaaagaagaacttaccaaaaaagtcagttataaaaaatgagaaagtcaatggtggaaagaaacttttgaattctaataaaagtggggcagccttcagccagggcaaatctcttacccttccccagacttgtaatagagagaaaatctatacatgcagtgaatgtgggaaagcctttggcaaacagtcaatcctcaatcgccactggagaattcatacaggagagaagccctatgaatgtcgtgaatgtgggaagacttttagccatggctcatcccttacacgacatctgataagccatagtggagagaaaccttacaaatgtattgaatgtgggaaggcctttagccatgtctcatcacttactaaccatcagagcactcacactggagagaaaccatatgaatgtatgaactgtggaaagtcttttagtcgtgtgtcccatcttattgaacatctaagaattcatactcaagaaaaactctatgagtgtcgtatatgtggaaaggccttcattcataggtcatctctcattcaccatcagaaaatccatactggagagaagccttatgaatgtagagaatgtgggaaagctttctgctgtagctcacaccttactcgacatcaaagaattcacactatggagaaacaatatgaatgcaacaaatgtctgaaagtctttagtagcctctcatttcttgttcagcatcagagtattcatactgaagaaaaaccctttgaatgtcagaaatgcaggaaatccttcaaccagcttgaatcactgaatatgcatttgagaaatcacattagattgaaaccctacgaatgcagtatatgtgggaaagcctttagtcataggtcatccctgcttcaacatcacagaattcatactggagagaaaccttatgaatgtattaaatgtgggaagaccttcagctgtagttcaaaccttaccgtacatcagagaattcacactggagaaaagccatataaatgtaatgagtgtgggaaagcttttagcaaaggctcaaatcttactgcccatcaaagagtacataatggagagaaacccaatagtgtggtaagtgtggaaaagcctttagactatatgaatcactatacatgtgagaaatcttacagaagagaaactgtatgaagcagtggttatcatggtaaatttcctagattctcccttatttaacattagaaaaatttatactggggaaagtcttatgaatgtggtgaatataggaagaccttttagcaaagatgcaggccagtttgtttattagactttatactgtagagaaatcatatgaagaccataaatgtgggaaagcctttgtcagtattaatcccttaattgacataagtatactcacactaggataaaaccctgtacatgtagcaaatgtgggaaagactacagacaataggaatcttttacaaactcctacaggagagaagctgtatgaatgtagaaaatttagaaattgagggaagtcttcagttccaagtatatcccttattctacagcagagaactcaaaatggagagaaatctcatttaagagatgtagcaaagtgttcactaagagtgtttatcttggtacacatcagaagattaatggtagaacaacctgaaggatttaggagttatgtgtaaatctttgcagtcatgctatttgtaaactggattctacaggagagcaaataaacattataataaaatatgcatttcttagagcagtagcttgcagtttcagttgagttctacttagaaattctttttagctagtgggcatgtgaagatatttagtcacccagaggagccagtaagtgttataatattgaaaattaaagctgcaaaagaaataaagtgatgttaataaaagttttggcatctaataaaatcattttgtatatcacaaactctttcactgtgactatttcctgtaaaaaaaatttcactaagattagccttagcgtagcctttagtgggagactagcaaacctagagaaaaatgacctgctctttatactaagaatagcagtattttgatgaggattattcagagtcaatttccagtaggcttaatcaaatacatttcaaaaaaatttactgagcatcactcgtgtattattacacagcgatgggatataggaatccagtagttctgagctttagtggtgtgtcaaagtcagtaggagggcttgttaaagcacagattgctaagtctgaatcttagggtttctgtatgagttgatttgaatttgcatttttcatgcgttcttaggcgacacactgtccagaaagcacattttgataaccattgtaataatgaacaaaacaaatctgatctttttctcgcagggatgttatctgacaagaaagatggatagcaaataaatttgaaataatggtttacaagtgctatgaggacataaccaagaaacaacatactacaagagatcagagcaggcttagcgagatgtgatttttgaaatgaatcctaaatgatgaacactaattatgtaatgagtactactcatgtagccatgtgcatccctgcatgtgcctgtgcgtgtgtgtatgcggtgtgctgggtgttaatctaggtaaagcagacagtcgagttctgtcatacttgctgcagctggattccacgttcccatgtctagtttcagattctgtggctttgaggtagtgctgctggcagcatcattgcagcaaccgtcatttctctatccctgagtcatagttacgggagtttaccttgaaatcactagcccagaagtgttctcattacttttacagcccacctaccaattttgaaagcactaatttgcagcaatatatgtcttgaaatagttaagagagattttgttctctgcactgaaccttgacagataattatgttttgtaaggaggcaggatggcttcaaatattctaagttctagataagaaatggaacagtctcactggccctgtgattagaatcctatcttgtgattagaaaggtaatgcagatcaatttgatttggagtgtatggacactgatgcaagtgaaggggtgtgatatggattatgcttcagattttgttctttatctcaggtgagagtagtaagatatgttattttaaaaaggaacattatgttatagttatgataattctggtgtggaatgagtgataaggtttctgactttcaacaaaatgtatctcctctgatatatgtgctaccttaacagaaagccaaagcacagaggcatattccaatagcaatttgcaagagacagtaggtttggaatggggtggtaaacttttactattttgcagggattttatctttcatttgatttatttttaatcatgaaatttatattgaaattctgtgaaacattgaaggatctttggaagatttataattagggaagggccagatgtagtggctaatgtctgtactcccagcactttgggagaccgaggcaggaggattgcttgaggccaggagtttgagaccagcctgggcaatatagcaaaactcattagtctgttaaaaaaaaaaattacccaggtgtaggcacacatctgcagtcctagctattcaggaggctgagtggggagggattgcttgagtacaggagttttaaggtcacagtgagctatcatcacaccactgctttccagcctggacagcagaacaccaccctgtctccaaagtaaataaatacaattaaggaagcatgatgtggtatcagacagttgcaagtatggatagactggctaccacatatatacttatgggataatgagagtagctttcttttctctcattctgtgtcctttctctgctctcccaagcaactggtaccacagagatgaagtagtcctataatgcccagattttgtttccactacacatagtttaatgctaccatgtcactttgttatgagaggattcatcgaaatacctgtgctttgtcatttaaaaagcatgggcatacacatgataatgctttacgtttctggatttaaagtgccttcacaatacagaactaggaaaaagaaggccatctttttaaatgaagatagttttaagagagcaataagagactattactttgttatgatagaaggttgggctgatgtcataatgatgttatgatgtcactgacatcatattatttcctcagtcatacctattaaccatttcttgagcatccactatgggcttaatagataagaaacactccataccctttaagagccctgaggtgtgtgtgtgtgaacagcattaaactttggagtcatgttacctgggtttaaatccaagttgcatgaatactggctttgtgtgaccttggacaaactatttcactgtgtcttgcctcagtttctccatctgtaaaatgataataaagctatctcacagcattattatgaagattaaatgcattaattggtgtaaagtgtttacaacaatccctggcctctcaatagcattcaataagtattagctattgattacatcatcattgtcttctcatggttgcttcatcattctggtctcaaaggtcacatctaatcacttgtcactcccatgtgtttactgtttaacatttttagaggagagctcttacaaaaccccccgattaacttccaacaaattcttgagtatctgagccattttgagggagggaatgtttcttgccctaaataatctgaggagaaacaaagagaccaggtaggagatgagatgggaacctagcaggtctatgggaaggaaggagggtgccctacagatttggaaaacgggccgagtgaaggaggcatcaggcttccacatgaaggaaaggggaggctctacccagagaccagaagcctacaggtcttcatcatcatctctgaatacagagtcctgtgggctgggtgccactgctttcactcttcctaaatggaggttagagcctgtcattgaaggtcactgatgcctggaaagtcaaacagtttccttgttagccttgggccagtcagatgtgattagagctcagttgttggtaaacatctagaaagaagcaaggcacatatcactgagcacttcctgggaacttatttttttgctgctgagggggagtcagtctttaaacaaattgcaattgtgttagagaaaaaagctttatatgcaaaagtaattgatgcaagatacaagacaatgacaaggccatatggcccaagaggtgcagagtgtaagcactctggcatcaaagataaatagggaaaaactataatcataatacaatactgttaatagcagcagcaactgggccttgtgtttgcactgtgtgctgcattgagacaattaaatgttctatgctctggatccaaattcctaggtgtgaattcagcctattgggactgtcgcttgcttactctataaacttggtgaagtcacttcatttcccaatttttccatcaaaacaaaaacaattcccatcttaccagctggttgtaagaattaaaagatttataaagcaagcaacaaagtgcctctgcatggaagtttgttgccgtgtttttcctgcttttaataatcttcccacatactgtaaggtaaatgccataatcatcttcatgctagtgacctgagtctctctcagagtcacacatcttaggaatataggctacatttgaacattcagtaaaagaccacacaatattgccctcctaggacagatctcagaagactggggtttctcttggcaaccatacaggctctcttggcctccctgaacaaaaaaatgtctcctttggccatgctgttccttctgcctagaatgtgtcccataccccatttattaccacgcttacctgccgagggagtcctgcctaccttgcaaagctcactaggtgtgtcaaagatgaacaaagctggacatttatgacagtggggagaacggactttaattggtaataactattgcaatggggaaaggaatttggcatgaactgaacccagctttgatttgtacagaggtgaatgagtatgttaaaggaagggtgaggaaatagggagggggtggagaagaggggctcagtagagtcagaaaagtgaaaaattacaaaacacaggaagggagggggctggtctatgtgcagtctatctgggtttgctactggcacttgaattaggatcctatcctcccacagagactgtgagacaggggtcttatcttcaggtgttggctggaagaaattctttggacagccttgagtttttcaggccagcactttaaaagttattagaaagtgttagtgttgttcaagtcttaataggcaaaagttgacaggcctattaaagaaggctcagaggggcctagctagagtttggtgaaagaaagagaaatctttgtcaggtatcacctcaggcttccccagcccactgaggaggaatggtggtgaagaagaagaaagaacaaaggctcaagggctcaacatacaggatgtgagtttccgccaagagttgtgtgaccctgagaagataacttaagttttccaaacctcaggttccttttctgtaaagcaggaataatagaacctaactctgaggaaattgggattaaatgaagtgctacataacaagttaccctcagaactcaataaatgtagttattattgttacttagcctctttgcttccacaccaccctggaaaaccgaaccaagtcctgatctctacttttgtaagtgtgccacattctctgcacaaagattccagaagatgagaaatacttaatctagagctagcaaggccaaagggaaaaaaaaaaaagactctcctagtaggtgacattgacattggtgcagaacagggaaggatgcaaaggaggagaggagagggagaggcactgcagagatctggactcagtgtcccaggcagagagaaacactgggaagtgggaaagagcttagaatgatcaggacagcttggcaggagagcagtgagcaaaggaagatggagtagagggcagatttataggcctaaggatgtatctccctagaaatagcatccagagggatgttccttgcacagtgctgggcactgggaacacacatcacacattagccatctctgatactctcatctagaaagaatgatggttaatatttcccctttaagccttccttgaggaaaatggaggtgaaggatagcaagatagcttgcacaaggccacagccctgagatagggtacagcatgatccaaacatgtctctggattctgcaggccatgcctctcccaaggatctgcacatgccactgtacatgaatgggggatactaagaagttatagttcatacttccccaccacataccaccaattgccaagaaagaggaactttcttttgtaatacttgatttaattctaggactctggactgagagtgaccctatcagcaggaagagaaggcctgaagaatcccaggatgccacgatcctccatgtcagcatgccacagccatgtggttgagagtccaagaatgtgagactagttaacacacctgtgctaggagggaggcgactgtatcagtacttcactcagctgaactctctcctaggccctacaaaggtgtctagatgagtcctatcctccttactggccttcctagcttggtcccaaagagtcacctgctccccctgggtggtgtggtcagacaggtcatgtgacaaatgaaagtccactgtagcagtgccaatagtgcaggccacaataatgcaggctgcaggaaacactcctgtcctaggctctcatttgggcatatgaagcacatccttctaggtaatgtagctcttcatattcttcgaggcaatggctaagtagcacccagagggccactaggaatgagcatcaaaagactcttatgaagagagtggtacttcatttcttaaaggtgagtacccagttttccatattttactgcctgcaacagatcacataaatatttagagacatattatttcagatactataaaatactacaaaaccaaatatgtggagtatgatttcagggaaaatgaccaaataggaagtgccacgaatctgccactgtacctgaaaaactattctggcatctttctgaagtaactatgttggaactccagagtttacctgaatgcttgtaatttccagcttgcctaataaattacaatttgtgttgattgcagccatcagagtggtattggctacacattcctcactcccagctccatggcaagcagctttggggatgggaatgtcattctggtgcagatttctggagccagggtgggcaataagtcccttatcccacagatactgaggttttgtgttctgactgtggattggtgcttctgatcttgtgggcttgtaggctagtcatcattgtttcaacccccactggatgaagtgtcttttcacagatataaaagaattgcacctatttttttgtttgtcttcaaaaacaactacatatacggaagaattcagaaagccacctcacatgcccatggaaagatgcaagcactgaaaagaccttcttcagttttcactttaggccgatctctggcacataattatcccataataatgaaaacagaggcaaaaatgcagcaaatccagggaaaggtggcgggaaatatgatttccagagttaccacatggtaagattcaaatgcccagtcttctacaacaacaaaaacctgaaggcatgccaaaaaaacataaaagtatggcccaattaaaggaacaaaatgaatggagggaaaacatacttgaggaaacccagatgtcagtctcgccagaaaaagacaactgtcttaaagatgcttaaaaagctaaagacatgaacaaaggaaaaagatgtatgagcaaaatgaggatagaaataaagagataaaatgatttctaaaaagaacaaaaaacattctagatcaaaatttacagtaatggaaacaaaatatgaatacaataaagggattcagaagacatgcaatcagaggagagattcagcaaacttaaaaacaggaaaatacaaattatcaatataaaaaagaatgaggattggaactttagcacaacaacaatttgggaatccctgaaggggaaaagaaagaaaggggcagagaaaaatacttgaagacataatggctgaaaaatctccaaatttgatgaaagatatgaatttgccaacccagcaagagttcaccatgaatgaactctaagcaggagaattgtgaagagacccacactgagacacataatcaaatgtcaaaagccaaagacagataatcttgaaaataggaagagagaagcaactcctctcatataggggatcctcaagactattagccagtgtctcatcagaaaccttggaagctagaaggaagtgggtcaataaacgtaaagggtgaagaaaaaaagctgtcaatagagaattttatattcagcaaaatgttcttgaaaaattatggagaaattcacatattcccagataaacaaaagtggagggagttgattatcactagacctgctctgcaaaaaaaaaaaaaaaaaaaaaaaaaggctaaaggaggtctatcaggttgaaattaaaagaagctaaaatgtacccaatgacaaaactccatggacataatcagtactggagctcaaattacagttataccgggggatcccattaaatttaagcattgtgcctctcctatcttaagaaagtcactatatataaaatagagaaaaagtaggaatgcctcactttaaatgtagccttgcctatatttcccaagtcataatacccattgccctaatatatcccatattggagcatagatgctctaacataaatcataaattaaggtaggtcttttacaaactggcttgataaaatgggaccccatgaatacccagttaaaatagttaatctggtccaatatagggtacaacagggccttcaagggttaaacctaattaataaaaaggcaattatcccaactgcttctctatttgatatcccaatcttgcctgttaaacctgggggataaaaaaagggtaaagtgcctcatggtgcattactataaccttaacaatgtgttcctaccaattagggcccccatacaaaacagctaatattattaaaattactgattctattaaatcaataatgagcaaatattttgcttttatagatttggagagtgtgttctgttccaggcccatttcaatagcctctcaactacagttcaccttcatttctgaaggaacacaatactcctgtttcaggctacctgtggggtacctcagcagctctgccatcacacacagtctttgcaagatagatcatagctgcatccatttttctccaggagcacagggtggaaggctggatcgagggtgcttattttccttggactcaatgaccatagagactgtcccatgcttcaggcagctactcatctgctatggcacccatttgagcctagacttccacaaacaaaaacagaagatctgttgaatgtactgcacactgttctggtaactattggtctccttactgctgattgggatgattcactggttttcaattcagaggtctaaactccccaaataagcctcaaccaaacatggcaaatgctgagttgcacatcaacttgagagggtacccatttaaaaaggacacccaagtcccacatctcagatgatttcacccttgcccagaagctcactgctggagatgacactgccccagcccaagtctttgccattgtagatgactttacctcttgtgccagggacaacttcaccccagatatgaaaacctctgtcccagtggtgcctatggagtgcctctcctaaggcatgcattaaacatggggtatttatgcttttctcccttggatgttaaaggttctactatgtttctgagcttgctgtctgcctaacctatgattctggtatattccttgctctttgccaaaatgtacaccctacacttccatgtctaacaggaaatctagtagaggttactactatctatgccgttctaaaaattagtggaaattactgctttcctcgggaggcatctgcctcaaatcagtcaaccccttctccccctagaaagagtaccatttactccctgatgccttttctactctcaccttgcatctcctactatgatcactctttccccttgatcacacacaaataccactaacctttacatatacctatcatttcatacccttccaacattacaactgccaaacttgtcactttgacctgaacatgtttctaatgcacttaataacactaccaagatattgttagtgaccctaaagatttcagaactactgtcttggataataccatataaccaaatttaaaaactcccaaagcgccatttgcttaaatctaccacctgccttcattcctcaccagggatggctacatgttatgaccaagttaacctatgggcttaccacttgtgcccaggagccaaccagcagtggccaattccccaccccgaggccttcaccctccttacaatgatactctcatgggtacactatactctgaataatggcacatttggttttttttgtggcttgaaatcacaggcacagcaccttatgtatttttccttgccaatcaccctggatgttttccctaataaaatctggtaaatagtgtttacactggggattgccatggttctttgtccacttggtacttccctgtttccattaacccaaagacacaaggcaaaatgggcagtgtttatccctatcttaataggacttgccataggcacaggagccaccactgctgacaccaatacagcaggctttgtcgaataagatcaaatcataactgccaagcagcgtcattacgtggccctttcagatcatattcaaaggctgtacaaaatactgtccttaatacaacaagcccatgagtctctagctcaaatggcaatagataacaggctggctcttgactattagccagggaaggaggagtttgtgccactcaggatacctcctactgtatgtacattaataactctggacaggtacaggccaactatgaggaacaggtcaaaaggtaaaggtttttcatgacttagccaaatattccaacagattcccttaaatccaggggtgcctggcccattctcttggctttcctccacaaagtgggatgccgtgttacaaactggataccaaaccctcatcatatgcctaataggactcttctgagctgttacctttattaaagtttaccttcagtggctaagtcatgctgtcccaggcacctttaacatcacaacccaggtggcaagtgttatccatccgattagtattgtaatgatgttgaggcaccacagggcaaactgtaatgtaaattttaaagcactgtattttcctgctgcctcggtatccccacaaacaggctgtgagccccccagccagctataccagtgtgattaggctggccctgccacaagttctgttgtgctgtttgtgtactccatcctggctgccaataaaggcacttccccataggtcttcattctcttggctccctaacagctcagttgagccagcctccttgatgctgtctgtgcccccttggttcccttggtgtgcaatgactctctctctaggacctgtaagtataataaaactttgttctttgacaagcctctcctgcgtttcctcctctgcctacacctgactgacagtcctatgagcacacaatttaaatagttctaacaacacaggaatcatgcaaaatattcaatccaaaggcagaagtggggtcgggggagaaaataaagagaatagattaaacaaagagaaaaaccaatagcaaaatgataaattgaaacccagcaatataatcacactaaattcaatgacctaattaaaaggcagagattttcaaagtagataaaatgcaagatccaataatatttcgtacaagaaaaccattttaaatataatgacaaaaattaattaaaaatcaaaggacatggctgggtgtggcggctcatgcctgtaattccagcactttgggaggccaaggcaggctgatcacctgaggtcaggagttcaagaccagcctgaccaacatggagaaaccctatctctactaaggatacaaaattagcagggcgtagtggcaggcgcccgtaatcccagctacttgggaggctgaggcaggagaatcgcttgaacctgggaggcagaggtcgtggtgagccgagattgcgccattgcactccagcctgggcaacaaaagcgaaactctgtctcaaaaaaaaaaaaaaaaaaatcaaaggacacagatacaccattgtaatagtaagcaaaagagcactagagaggctgtattaatattacacaaagttaacttcagaacaaagactattacctaaatatttatatacctaatgaaagaacttaaaaatgatagatatgcaaagagaaatagacaaatccataattacagtagtttttttaaaaaagaaaacaccattctctacataagtgacagaacaagtagaaaatcaggactcagaagacatgagcaacactctcgaccatattgacttacttgacatttatagaacacccaacaagatcagaatgcacactattttcagtaataatgtgtaaacattcttccaggatagaccacattccagatcataaaacaaacctcgacaaatagaaaagggttcaagtcatgcaaagtatgttctcagaccataatcaaacttcatagatcaaagaagaaatcaaaagggaaattaaaaattattagaactgattgaaaattatgtcagaatttatggaatgctactaaaccagtatctggagtgaaatttatagcattaaaggcctatattagaaaaagaatgaaaggtctcaaattaatgacctcagctttagaaggttgagaaattctgacccaagtgtaaaacatacaactgttaaatttttagaaaaaaggaaaaaaaaattttgtgtatctgctaaaatcatcccatgacttcacatagcaattagaattaaatccaaatttcatggtaccctatctgtgcatatggcctgctactccactccatcattaatttctattctccctgtcaagccacactacattgagctgtatcctccaacagtccaagctcttgtcacccttgaggtcttggatatgtggttctctcttcgggactcctgtatgcttcctggttctgcatatcacctaacagactgtaggttcattttcccatgtgtttaatgtccaccttcctactcttacagagagtaacacagctccatggagaagtgcatggccaaggtcacccaatgggtcatggaaacactaaatgatccgaaatcccaatctatcatctaggctcttagccaccaggctcaagataggtacagccacagctacagcagaggtggtcactgtgagggaggatggggtcttcagctcttcccaatgagtagaaaactaaactgctatctgtatatatgattgtgaattctatatttgagaattcacctactaaaattttgttataactccaaaatcaatactttgaggtttttgcatttttgcagtcatttgcagacatgtgcagagtgatgaaaaaaatgattcatcaagcctgcatgtcaccagctgaggtcaaaggtgatgcctactttcttgtttcggcattcataatgtcgtgtcattttcagtcatttagtgcacaatggctcatgcctgtaatcccagcactttgggaggttgaggtgggtggatcacttgaggtcaggagttcgagaccagcctggccaacgtggtgaaaccccgtgtctactaaaaatacaaaaattagccaggtgtggttgtggttgcctgtaatcccagctacttgggaggctgagacaggagaattgcttgaacccgggaggcggaggttgcagtaagccaagttcgcaccattgcactccagcctgagcaagaagagtgaaactctgattcaaaaaaaaaaaaaaaaaaaaagattcattcagtcatgagttatactgctgttgtctgagagttcaatgtctacaaatcaacaacacaatacaaccagaaataggaggaggaaattcacctgtctgtacatgaggcagctcctaaaagtataaaaaggaacatctataatgcataatgcatgatgaagttatagaaaacatgaaaaaaggctaaatttatgggtgaatcagatgatgaccaatagaaaagaatagaggacagcattattgtgagtcttaaagccaaagaaatttatggtcacgatacctaagtaaggaaaatgctaaccctgctcagctagtgctggctactcacacatttcaaaaggcactacaacataaaatgtattaaacttgcaggcaaattcttctgggggctgtggaagaatttaaataatatccactaaatgttatacaggaaaagggttatgtgaaaaaccaggtttcaacactgatgagaatggcttgttttaaaagaaaatgaatctatatagcacaaatggcctccaaagtcccttactttaaatcattcaaagatcctgcaaccttgctactgtgcatcagtactaatggtgactataagtgcaaaccactaatggtgtagagaaccccaaatccgtaggaacttaaagagaaaaacctgagccatatgcaagtccactgtaagtggaacagaaaagcatggatgacttcagaactattctgggattggttttacaactgcttcatccaagaagttgaatgctatctccaaggcaaaaactttgccttcaaagtttaattaattttaaataatgctccagttcattgccataaagaacttgaaaattcccactgcaacctagacattctttttatggccacaaacacatgtgtcatacaacccttcaatcagagcatacttaaaagctttcagggtgcacaacatgaatgacctttatagcaaggcttgtgaggctctcaacaccaacaaggaaaccaccgttttggactactggaagccagtcactgtatgcaatgttatttaggcatcaaagtcagtgatgataaagatggtgacgaaggtcagcctaagattccaagaactgttctcacagcagcaaaaatatcaaactgaaatcctgccctggaaacattttcaattacatggaagaatgtgaccctatgctcgaatgtagcctcaaatttaagcccctaacctccaatgcactcctttatgctgggacactgaggtggagccgggcacagtggctcacgcctgtaatcccaacactttggaggccgaggaaggaggatcacttgagtccaggagtttgagaccacctgagcaatatagtgagacccccatctctacaaaaaacaaattagctgggcattatggcacatacctgtgatcccagctacttgggaggctcaggtgggaggattgcttcagcccaggaggcaaggctgcagtcagccgtgatcactccactgcgctctagcctgggcaacagagtgaaaccctgtctcaaaaaagataaaaacactttaggcgaaaagccagacaaggctgatgcaatttttcatgccagctcaggagggaaaactgctgatgatgtcaacaagtggcaaaagtcaaactcctgaagtaaaactgccagatgttgatatggcaccctcagtaatgccttcctcttctgaaaagtaagttgcatcaacctcttccttagttttttgggggtaagttaaagtcaagcagtttaaccatacagtgcgctgtcccatcacacatcttgcagctccatcaaaagtacaattttaatctttttttaatctttaatgtttttcccccaggactatctttattggcacgactgtactgtatagtataggtgttcacagtaccatttactgttatgaatactgtacagtttgctgtgtttattgtacatgaatactgtatatgtgtactgtgtgtacataattaagagttaaagcagtacaataatatactgagtacattacacaaacatgctataattaaaatatttttattataaagaataattataattattcaagaaacactgataaagtgtctttaaacaaacaaacaaacaaatacccatagaagaaggttatgtgttgactggttgataaaaatgtttggatcagaggctcacagaagctaacgctgtatttcccctagcaacaatcattcagcattcactaattcagtgtgcacagaaaattcacagaacctaactaccacgagtaacaattcactgcatataaatgtacatgtgtacatgtgcacatgtgttaagtatttcatgactcaagcctttatatttctcacaaagacacactccctcaagggtagagatgacagttttggaacaatgaatacttttactaaatgttggcagagctgccctcaatggtccaactctcctggctctggacttagagatatatatatgtaaaacacacaaaggggatgagactttttcaatgtcttattccctgctccatcccccaacccgccaaatgacaaactgtcataaacagggaaactgaaaacaagttatgcacatctttttcttttatcttctagattgtttcctccatctctcattattttaaaatatgcttgagatggatttatagtattaataagaggaaagttgttcctgacattttacctaaatgcatgttaaccaccaggtctctcccctcgattattctcaggtacagtgtaaggctctaaactgggtgaatctttaatataattctttggatgacaagtgattacctgccataaaaagatttcacagggacaattctgtttctagttagtataaattatcagatactaagacatctctctggccaaaatatttccctcaatagttatactcaaaaggaaaggtatgtcaccactatgagttcactaaagacaaacacacttgtaataggccttcctgtatcttttaaactctggtatgaatctttcgatggtgagtgaacgatgaactgtggctgaaggtctttccacattcattgcattcaaagggtttctctccagtgtgagttctcatgtgctgagttaaagcaaagttgtcacagaaggctttctcacattctttgcattcaaaaggtttttctccagtgtggatcctattatgccgaacaaaatttgcaggttgggtaaaagcctttccacattctctacaaacatagggcttctctccagtgtgaatcctcatgtgtcgagtgaaggaagagctatagtaaaaggcttttgcacattctttgcactccaagggtttttgtccactgtgggtcctattatgtcgaataaaaacagagtggtgtgtaaaagcctttccacattcactgcactcataaggcttctcaccagtgtgaatcctcatatgttgaattaaggaagagctgtcacaaaaggccttcccacattctttgcactcaaagggcttctctccggtatgggtcctcttatgtcggatgaaagtggagcgatgagtaaaggcctttccacattcaccgcactcatagggtttctctccagtgtgaatcctcatgtgctgagtgaaggatgagttgaggcaaaaggtttttccacattctttacataaaaatggtttttctcctgtgtgggtcacattgtgctggataaatgtggagcggtgcgtgaaggcctttccacattcaccgcactcatagagtttctttccagtatgaatcctcatatgttgagcaaatgaggagctgtagtaaaaagctttcccacattctttgcataaaaagggtttttctcgagtgtgagtcatattatgctggataaaagaagagcggtgggtgaatgctttgccacattctttgcactcatagggcttatctccggtgtgaatacgctggtgctccgtgaggtgaaacctgcgtttgaaggctttcccacactcaatacacttgtatggtttttccccagtatgaagcctcatatgtcgaatgacatcagccatataacgacaggctttcccacactcattgcactcatagggcttcactccagcatgaatctgttgatgccgaacaagggcccacttcttgctaaaccctttcccacattccgtgcatgtgtaagggttattccttgcatcagtcatggggtcttttcctggtccttgagagtcacactcatggagagcatcttgtggagtgactcgttcctgtaaaacccttaagcccagactatcatctggctccaaatcatcatgtttataactcaacttctcagggcatatctctttgtgggggtttgttcctggcctcaagttcccttcctgaatttttattagcttttcctcatctctagcttgccccaacctggaatctcttgaggatctctgtgccagaagttcctggaaagaggattcctcagagaaggccagctgagaagcagtaggctctgtaatcttgggttttgctttttcacctgaaggaaatccaatataaaaaaaactgaacattagtgatgtcaacagaacaaacaaaatcaccactttagcagaagaatgaaggtgaaaacagtgtctctgatgcctactgcatttttacatctctcaaaaccaggcttgcaatttctttcctaatgcttggactcttgagatctttaaaaggaaacccagaaggaaaagcaagggcagggggcaaagaatctggaatggagaccgctcctcactctcccaaatgagggagagtgggcagactaataattacaatgtgtgtgatgaatgtgctctgacagaggcagtctcatggtgctatgacaatgtagggaggatacacttaacatggcccagatgagagacagagagggatcagaggatgtcttggatcacagcaccaagaaaaggtgagctacgtgggctttctttaaaaaggagagtaggagttcccagacagaggaattaggagggaaacttcggcagatgaaaacagaatgtacaagggctgaaagtcttgagagaatgctgattgctgagtaatgtaaatgggatgacatgatggagatgaggatggaaaggcaggcagagacagagaagaaacagactctcaggattctcacctgtgtaaaagtgagaagggtgagaaccagctagatgaacataatgagtctgcaatgtctgaataaagactaagtgaacatacacaaaataggtaagatctacatgaagaaaattgtaaaacttaagacactaaagatctatatgaaaagagattaatcaatataaagttatcagttctccctaaattcacttctaaattcaatacaacatcagataaaatctcaatagggtttttcacagatattgacaagctgactgtggatagagatcagtcagctgatatagagaccaggataactctgaagaataaagcaggggccttaccctatgaggacttagtattatgatgaaactatatgcattcaggcagtgtgattaggcatagatataagacaaacggtgaaagggaaaaatgaaatagagaactcagaaatgtatatatgtaactttgatatatgatagaagcagcagagaaggccattgggaaaaggaggaaccattcaataaatggatctagaaaaattatttgccacatggagaaaaatgaaataatattcctacctcataccacatacagaattacctccagagtgattaagactcaactgtcagaagctaaacattaaacatattttgtatataataaaaatgagtatcttttgagaaagatttccagaacaagatataaaagcattaatcataaatgaaaagagtagtcaatttgactagagtaaatataataaacaaaaaagcaaacaaataaaaaacataacattagtatcagatagcaaactatagacctaagcaaatgagacaaagagggacttcacaagatgaagagaagaccatggcgccaggaagacaaaatcgtcttaaatctgtatgtgccaaacaccagagcctcaaaatacatgaaccaaaaactgagttgaaaggagaaataaactcagaattatggttgggaacttcactctaccccaaaatgaacatattatgcactgatatttcacagaagacatacattgcccagtcaacataagaagtgttcacctttcttggtaataggggaaaaacaaattaggaccacaatgagatgccccattttatactcgctaggttgaaaaaactaaaggaccggacaacatcaactattgaagaggaagttgttctatgaaatcattcagataaggcaagggaagtgaaatgggtataaccattttaggaaacaacagagcattatctagtaaaattctccttttgctcatcttataatccagaaatgccagtccaaggaactttactaagagaaactcctatagatgtgcctgaggacacatatatatgaattatggcagcattgtttgtgataacaaaaaacaataagcaaacattttcaagctctccctgaaaatggataaatacattgtgttatattcatgcaattgactctagcaggaaaaaaaatgagtgaactacagctatatgcatcatgaatgttagtaacttactgttgaataaagagtgaaaatgccagaagacaatataaaccacaatacactttttataatgttcaaaaaaagcaaaatacacacacacaagaatacaatgtaacaaccttttatttttttgaggtttatcagttttaaatggcattataaaaagatatgtagatatgttaaatatatttttctgactttttattgtgataaaatacaaaatttaccattatgagatgaaacaatcttaaaaagtaatgggaagacaaagataaagtaggcaaatattttacattactcaaattaccaaaacggacaaacaaaaacagaacatctgaatagcctatatttatgaaaaaaacctgaatcttcctacagaataagcaatggaataacaaatcttaaagtggccatgtatgcaagggaggcagcataggaatgggaaaggaaagaaacacatcaacagatgcaggaagcaggtcatgttcttgtacttggcgaaaggtttgtaggtgttcattacaatctttttaaaggaggatgaataaatatattaataaaatgcaatgaaagaaaataaaacaaaaaaccaggacacgcattgactaatgatgacaatgtgtcataaatcattatttataatttttctaattctgcacacctagggacaattatgaaagtcagaggggggccaggcatggtggctcatgcctgtaatcccagcactttggaaggccaagacaggcggatcactgaaggtcgggagttcaagaccagcctggccaacatggtaaacttcttgtaagaagtgaaggcactgagggaaggccatgtgagcacaaagtgagaaggcggccatctgcaagctgagaagacagcccttatcagaacccaacaatgctggtaccctgaccttagacttgcggcctctagacctgagagaaaacacatttctgctatataagccacgcagtctatagtattttattacagcagccagagcagactaacacacttttctaagattcactttcctcatctgaaaaactgggatactctcagttcctgcctacaagttgttaggagaaaaagcatacaaaatattgatttgtggctgggtgtgggggctcacacctgtaatcccagcactttgggaggctgaggcaggaagatcacttgaggccaggagttaccagcctggccaacacagcaaaaccctatctctactaaaaatacaaaaaattcagccaggtgtggtggtgcatgcctgtaattccagttactcaggaggctgaggcacgagaatcacttgaacccaggaggcagaggctgcagtgagccgagattgtgccactgcacactagcctaggcgacagagtgagatcctgtctcaaaaaaaacccaaaaaccaaacaaaagttcattcgtgtgacaaagaataaatgtttggtaaactgtagaccactgtctattatcattatagttgaatttagcaatcaggatggcaacagtgacctgggcaagaacactttaagtgctgtggtgctgagaaacaccactaccaggcatcaaagagtaaagggaaagacaccaactgctcaggcgtacatggaacaatgaagactctcatacgtggctagtggaaatgtgaaatggtgtagttactctgaaactggtggtttcgattaaagctaatcatatgcccacacttgatctggccagtccacttgtatgtatattcccaacagaaatatgggtttatatccaacaaaaaatacaatcaagaatattcataagagtagtcttcataatattccaaaaatggagaccaagtcaaatgtccatcaataggaaaatgggtatatgtagtctattcattcaatgatggtaatgaactaactccaactatatgcaaccacatgaatgaatctgagtcataaagattatcaaaagaagtcaggacagagtatgtactagggggttctatttatatgccttcaaaactaatgtatggtgatatagagtataaacactgactacttttatagaaggggatactgacaaagaatgagcacaaggagcctgttaagtgctgaaaacactgtatttcttgaactgtgagatggtttctctgacttgtacatatataaaactttatagaaatgaaactttatgatttgtacacttattatgtataaattgcacctcagtacaaaaataagggaaaaaataaataaaggaaagtcttgtgtagatgtctcttcaaagaatgagaagacttctccaacaagcttggctgttcaggtgaaatagagtcaacaatatgtagatgctgctggagacgtaagagcactaaaaaaaaaaaagtctcccccaggtatcagaaacatcatcatttttttttaatgttgagtagagaggggatgaaaatatagaagaggtaggaagtaagtgaagaagcatgttccctgatgcagctgagagattcacgtatggcttctcatgatccccaagtcatagtgttcacacccttttgtagttcccctgttaaaatgttggcaggacctcgatttgcttctaaagtatagaatatggcaaagatgatggaatgtacatgataaaatatatgtaattttataagactggaacatccgtcttgctggagtctcacacagtggcttgatttgaagaagtgagctgatggtgatgatgagctatgagctgcctatgacacgcctgagaggacccagctaagctgtgcctggactcccaatccataggtgggagataataaataagtgatgttttcagctgcagggtttgtggtaatattgttacatattaatagtagatggctaatacacctgagaaggcagaaagtgtaatctagattctgctggagaaattagccatggccaggatgataactcttccacagaagtgagaaggaagctgcaggataagtcagatgaacatgaatcagtaagtgtcaaaaagcaagaaaatcaagtgtgtaggctttattcataaagtaggtcagatgctctgacatcagtggcaagggaggcggtgatacatggaacatgtgagtggatgcagatataacacacagggctgaccagatgcacagagcacatgggggaaaacagcgaggaatctggtagcattatgcaggcaagagatgatcacttggcctagagtactaatgctggagctgatggaaactagtgaaggtgaggattcaggagacatgagtgatgtgaaatggtcaagattcggggatggctggatattgggtatgagggagatggaggtgttgaggggttgtccacgtttgtttttagccttctccactcattgaaagaggcattagctgaaaatgggggtgatcatgaggtccttttaggcatgatgagtgtgaggtgcctctgagacattcaagtgaagatgtggaataggggagaggggtgaaggctgactgagcaggcaagaaggacactagaggggtgagatggtgaatctacagtgtcacaaatccacctgcttgatggctccagcttcctctggcagcccagatgtgggactgacaaaggcaatcatcaccttgaggtttttagaagacaggagggccagaaaacaacagggctagggagtgcttctgcgtatctgatacataaatgaaaagatgaatggatggatcaataaatgacgggctggagaaggtgaaaaatggtgggatgcagagtgtagtttgaaatagtaatctgcaggaaaagaaaggactgtcttctgaatgcagaagaatgtctgagctatcactattccttatgactaacactacattaatattacttacaagtaacttctgttgagccactccgggtcaggcagtgtgctaggcagtttcctgctatgtgatcacattcccaaacaacccagtcatgcagaaactatcatcactatctttcaaatgtaggctaagtgtatcagataagtatatgttcactatacccataggctcttctccttgggtataaaaaagctaaaccacatttcccagcctgatacaacatgtagcctaatacccagttcttgtggatgaaatgttaatggaagtgactactgcccttctctcccattcctcttggccggggcaaccttaaagctgcatattgacaacagaatgcatgtgatccataaataaatacagggtacacagctttcctgctgacccacattgggctatggcatggataaaaaaacaaaacaaaacgaaacttaatctgttgagtcacatgattttggagtttatttttcagagaaggtcattaactcagcctaacttatataccaaaggcacagtgacgtcacacaacctctccagagtcatgaggctagtgagtggcaaatcattaaagcctagaatctgtctcctacctaacatattccaacctgaataaaggcaaagagtgtgtgacagaagtgggaagacgggggaccatggggtcaagggctccatgactgctcaagaccacaaaatagctgcccatggcatttcagacacagtgatgcctgggtggtctgcaggctgccctgatacccgctgccagactctcagtcaccaacctgcgcaggtgctttgggagaggcctctcttcactgtccacagttcctgtccatgttccagtagatagatcagctctggtttgggaacaggatgccctgtgcatggagaaacaaatggagtatggtgtacagggaaagacaaaaagaaaagtctgaggtgtaaaggagtacatatatttaacatactgcaatgaaaccccagaaagggccctcccctgcctcaccaaaagtattccctaattaacctaagtcagtaggattcaaccaccctgtgcatcaaaactacctagcaacacccagttccaaaaacagaacaaattaaaccaaatctctgagcagaaggactgagtgctggtagtttttaaagctccccaggtgattttggtgcccatgatggttgaaaaacacaggactaaatcgcctgatgaatggcatctattgatagtcagttgtgtgaggcaggccagtgactgaagctgaacatggaggcctactgccccacaaggatactggccagggccctagaccaaggagagaaagcagacagagaactgggttagcatggattggcactgaccaagccaggagtcagcagcacctcagggcttctcattaggtaaagtaagaaattattttcagggtgaaactggcaggaggtggtcttcttccacatgcagccacacacattttgccaactgtgaaggctaagacagaagactctggagagaagtcaatgactgaggcaccaggacccagaagcatcaactggaaaatcttgtcctggcacgcatccagctgtcacttagcaaatgttcaccataggattacgcacacttacatgccacatgcacactcagcaaatgttctgccatatgcttggcactgagctgggtgatgagcagcattaaaggggaatcaggcctgccttcatctctgttaaggaatcaagcaccctgctcccacagggatgctgctcatgttggtccctcctcctggaatgctgttccccatacatctcctttcgacaactaatcacagttgtcataaaataacaccacgtttacttcattaatgactcatccctcgtgaggacgcaggactgggagagccctgtcgatggtaaccatttgaacaactggaataagtgagactttgggcctccattcatatctactcagaccaacttctgggcaaactgtccattaaaggtttaggtgggagagcatttggtatttattaatttgttaaatgtaacaaacacatgcagaacacttgctatgtttccagctctattctaagcactttacacatattagttaccttgctgtgacaggttactataaaaatggcaaaatcaaaatgataacaggtcccagcaagttcctgctgcctgcttgaggctaggagtttgaggctactctttctactgaggaggaaattcaccaacagctatgggagtgttaaagattcagccctaagccaacactcaacattcaagagacaggaaagagaaaagaaaaaaagaacagctttctcagatagcatacatccatgccatttgagaatgtgtctgtgctccctttccataatcataatcatctcctgtagcagcagaggagcaaggcacaggccttaggaagtaagggttaactgtgcaggtgctaggagccaaagagacctttcagctgagactgtgttgctgaaaaagatataagcagcactgataacaaacaccttcttagtgtctgtgtcaatcacccgctgcttgtagaacctcccattatccacaggtcctgctaactgggctgtgaggacatttgactcaaccaagctgggccaattacctcttgtggcagtctgggataaagatgtcagactgaggccagctgtgctagacagtgggataaaagtgttgaggaggactgtgtttcttacataacaatctttgattgagacacagggaaacccagcaagaggaggtcagaccacaacgtgctgaggctgcagggatcagggaaggttgggttctgaggctcctggaccagccatgcctagaaagggtggattcaaagaggctgtgggtcccctacatgggagggtaatgaggtcttacccagtgagaccaggagcctgcaggtctccagcatcacctcctggtacagggtcctctgggccaggtccaggtgcccccattcctctccagtgaaggtcacaaccacgtcttcaaatgatactaatgcctgggaagtcaaacagaggtgacaggtggctgtggagctattaggtgaaattacagctcacttcttggttactggcaaagggtccagagaccctgaaccactgagcaactcctgagaaccactgggctctgtggaggcagatggtgccgctgacagaatacaaagatgtgggacagaaaagcctcctatgttggaaaccattggaaaatgatacaagacaatgataatcccatctgactgtgaggagcagacagtaatgtcctaggacattacaagaatggggaaaaataataattcaaacaataatcacagcagcagcagctgagcctcactggtctgcactgtttgcctgcacctgagggcttcacatgctgtgttcaagcaactaaaagtctccaggtctggaatcaggctcctgaagtttaaatccagcctcttgaaccaacctgccagatgtgtgaccttggagaagtctcttaatttcttggagctccaatttccacatcaatacattaatagttcccacttcaccgaactgttgtgaaaattaatgagaaaatgttcataaagcaaacactgcagtgcccagcatgtgttacaatgtgtgtaaatttcaatagtcatcctatagcccatgatgtaaatgtcatcatctccatttcacaatcagcaaattgaggctcagagtcaagtcactcagagttgtatgtctaatgagcagaagcaggatttgaacccacatccctcgggtccaggatctatgggtgtaacccctgtactcctccatcaccacagtgaatccacagtgacaagggctaaaaatacttcctacaatttttacagttaaaacaatttcagccactcctgaaaatattgccagaggtatggaaggaagagcagagccttcctttgcctcatagaagaggcacctgaagaggtgccaactgcctagggcttgggagagctcaaacaaagtttccctgccctcaggcagctgggacttgtagactccctggaatatcccacaatgagcgccaacctgttctttttcttcctgagccacggttagcacatttcccttaggtacaggtaacacaagtggccaagggcaatgcaggctgtggctctaagaacctggcagctgccttaagcaccacgtctgtcctgggtgagaatgggatgttggcatgatgatcatcagatgatcacacaagacacgtcagcaggtgacaagccttggtgtcactctatgtctcctcatgcctctgcctttgtccatgcagttccctttgccgggaaggttccccaaagaccccttcattccaatgtccacctgctagagagaggcctgcaccttccccttgcaaagtgtacttcagctgtcgcccccagggatctccaatccactgtgggtgaaatattggttaaaaatgtaagcttctggctgggcacgtcggctcatgccagtaagtactttgagaggccaaagtgggaagactgtttgagttcaggagttcgaggccagcctgggcaacacagtgagcccatctctacaaaaaataaaaaaaattagctgggtgtggtggcacacaccgataatcctagctactcaggaggctcagtggggaggattgctagtgagctgcgatggggccactgcactccagtgtgagcaacagagctagaccctctttcaaaaaaaataaataaataaaaaatgtaggcttttatgctcgacatactggattgtttctgttacttatgagctatgcaaccttgggtagttaatctgagtctccggttcctcttctgtaaagaaaggaaaatgaaagaattttactctgagaagaagggcgttaaataaggtaatacacagaaactgcctctcagcacattatcaatgcgctcagtgaagaccagctactatttgttgctgttagtatttttcctatttgctcctgtcgcaccctaggagagctcaatgcagcacacatccaggagcagccttgcagagatctggcgacaatgtgacagagaaaatcgtccaatgagcttggcatgtgcaggagagaagaatggcagggggagtgtcctggtggattgggcagtgactttgcagccatggtggggtatggggtggggttgggttagatgaaatctaagtaggatgggagccccagaggatagaatctcattcattaatcacttatcgactaagtggtacaggcccagaacagaatagttttgggcctggggatgaaaaacagaacagaagctgacattctggggttgggggacagatcctcagcaataaacaatcaagataaagtcagaagactctagaaaacaacacaagagtgagaagaccacaaagactgggagagactttacatgatgcaaccagggaagctctctctgaagagaccctggaacaaggttagattgaagttagagaacagaccaggtgaggaaaaatgaatagacaactcctgaaggtgatcagagctacgaggagtaaacagtgtgacatgctggagagtaacttggggccttatgtgctcacactccaagagacatacattcatgtacactgtcattaatgaatattgtgctggatttgcttttcaaatacaagagcatgtgttaaacagaagcacggattcactgctgttaggcggcaagccagattcatttgtaataaacagacggcatctgcaaagataaatccaatgagcttcttgtcttctagcctcctgccaaaaatgctgctcccgcctcacctcttgccctcgaggctctcattccctctcccagcttttggtagggccagacttccgctggaatgatcccctaaaacaacagcaggacctagagagtccttcttcaaagacggcacctagagtgatgctctccgagcagtgaaagacaggacccacgtcacaagcgtaccctctccagctccctccacagagaaaattactgagactcgcattttagacccgagggaatggaggccgagggcagcgaggcgacagctccaggttagagccagagacagggacctctccttacaactcctgtcctggattcaggaccctgggtaggaagtgattagccctgccctctcacctcaccctctcccgggatctccataacctagggcatcaaaagggagaagcacagagtcccggcatccgccgtattacagcggatgggtgcatgcgggcggtgacccgagctcgcgcgggctgcggaaccctccactcaccaacgccggcgccgccatgggcccagggggctgggtgaggccgtgagagtcggcgaggaagccggtcctgcgggctcggccgaccccgggctccggctctgggctgcgagggacctcagtccccgccgtcgtgtaaaatgcacacaaggttcgcggcgccgcctctgcgcgccgtgaggacacagggctgtcgccaaggccccaggaagggttttgcagacgcttgtgggggtgggatcgcggctgacataaaagcgtgtaagtgggtcctatcctcctcactgtccgtctctactcggtctcgaaaagtggcccctgtctggcgttctacccagtgtagcgttggcaaccacagcagccgcaacctaacggcggacgaagactggacgccggaagtcccgcccacgccgctacgggaacgcccctctgcgccttccgtctatggcttggggtcggcttccgtcccttgtagcactgccttctgggtaatgtagtttgacggaatccgggtggtacctggagcgcactttctgttctcggtgaggcggcttctcaaggctcccaagaaagggattggcttcacctcttcttaaaggagaggcacacagagttccgtggaaattatctgaggcaatgacccactctcaaatgtctctaccaggcaactcacgccttgactttcctccctgtgtatccctgcgccagcagttcatctctctgagccttgagatggagattcctaaggaaaatgaagataattatttaatatgataatattaaaatttcccctatcagtaattttcagatgacatcagcattacctgcgaatttgttaccaatgcaagttcttagtccccacccactgaatcaggtactctggggggtgggacccagccctctgcttaacttgtccaggaaaagtggatgctgcaaaacatttgagaaccagactctttaaattccagtaaataaatgagacaaagccacctgtttggtgggaagtaactaagaattgcttagcactgggcctggaacataccgataagaacataagagctattgctgtcattattaatattctgtattattggcaacatcatcacaatacactgctaggggagggtctgagatacttctttgcagactctgatatttgtcaaaacaaatacgttgactgattcaacaggagcctcatgaatactgtttaaattttacataataatacgttgcagcatttggcgtatgcatctttttaaaacggtatatgcaggagggtttcctaatatacaggtagacctattgcccaagggatactttcttacatgattcaaaacttaggatcactgagactaattacctgcagccctaagggaagagtggagttgacatggtttctagtttgtgatgtaagatggcgtgtcactgttcatctctaattcacagcaaccaggatctgacccctccccatctgcccctccagcccccagggaagccagaaccaggcacaaaccagatggcccagcttatgcccagcaactcagggtcaccagatcttgtctcatcaagacactttcagcccaccacccaaacctgtagcccacatgaagagggcaataatcctggacactgtgaaaagtaaaagcattacatccaaagaggcatccccaggatggagcagaaataagaaaacataatgaagacacaattttgcaatcacttctgcctatattccatggcctacaaaccactcaaatagctccacatgtaagagaagccaggatgtgctgtcctccagagcatccagaaagagataatgggactgataagtccttggccattttctagtaaaatctattaatttagtcatcagatttccattctattatttatcctatacattctacactctcacatgcttcttaatgcgagaagccaaaatctgcatgcagtctctgacctcatctgaatgttaagatctcagggtgatatgttatgcatctagtccagattttgggtggggatgcagccaaaccatataatattatggggcctgttgggaggtgactggatcgtgagggtagatttctcatgaatgatttgatgccatccccttggtgctattcttgagataatgagttttctcaagatctgactgtttaaaagtgtgtggcatcttcccctcactctctcttgctcctgctctcaccatgtgctacactggctccccctttgccttgcaccatgattggaagcttcctgaggcctcaccagaaattgagcagatgctagtgctatgcttcctgtacagcctgcagaactgtgagccaagtaaacctcttttctttgtaaattacccagtctggggtattccttcgtaaattacccagtctcaggttttcctttacagcaaagcaagaacaacctaacacatttaccaacttatgaatggataaacaaaatgtgatatatccttataacagattattcagccataagaaaagactgcagtgctgatatacaatacagcatggaggaacactgaaaacatgtaagtgaaaaaatcagctacaaaataaccacacagtatataattccatgtatatgaagtgtgcaggataggcaactctatagaggttgaaggtagattagtgattgcttagggatggtgggtagtggtgggacagccgattgatatctaagggatatggagtttctttgtgaagtgatgaaatgttttaagaataactgtgggggatagttgcacatatatttaaatatgttaaaaccactgaattatgtattttgaacgtgtgatttatatggtaagtgaattatatctcatgaaggctttttaaacaaaacaacactgctgtaacttagaccaaaccaaagtttgtgtcaaatcctgctatgtaatatttgttacattttatagtctaaaatctaagctttatttatgaggatactcacttcattgctgaggtgtgtcaacaaaacatattagtaaatttatacgaacaaaatattagacctattactgcgaaaatacaaaacttggaaataggaaaatttctttaaaaagaatcctatttagagtcaagggaagttatgaaacacatcaaggaaatgagtagttgctaaatattgagttaatatgttatacattccttctcagtgattacagaatacttatatcaaatgaaattagatgaaatatatatttgaaaggtaaacatccaaagtagaataaatttatcattttgtatcctaagtaatagaatttctttgttgcatttactttcaatcaacaaaataggtaagtgctttattgctactactttgatttatttcaaaacctctttgtacaatgtacaaaatgtaaatgtaactttaatgtaaattgtttttatataaattgtgactcaaaatatttggacagacaagttgtgtgagatgggctttaggcaatcatgcaatcctaactcatatttcatacagaattcatatattttatttacacatattcacttcacacaagactagggctaaatttaagttaatgggtttgattattattttcccacattaaataacaacactatttatatacacctcagggatattcccagaattttaaacatgggcttgcgattcttcagctcttgaatcaaacaaaaatgttctggagttttataaactaattagcaaggcagcggctgtttctattgaataattcactgctatttctgtgattctaataaatgattgcaaaaacaggaaatcacaactaaccaaattcctcacattattagtgaggaattagtggagccccaaagtggggctcagactgtgagggttcttggcttcacccagggaaggattcaagggcaagccagtggtagaagaaaacagttttattgaataggcagtgttacagctctgtgactgcctctgcagagcagggctaccccatcggcagagagtagcagctcagggcagttttgcagtcatatttatacccacttttaattacatgcagattaaggggcggtttatgcagaaatttctgtggaaggggtagtaacttttgggtcatagggtcactgccatggaaaggggtagtaacagccaggtgttgccatggcaatggtaaactgacatggcacactggtgggtgtgtcttatggaaagttgcttccacctcatccctgttttagatagtcctcaatttggtccaatgtctgaccatgcctctggagttgagtcttgcctcctatcttaaaacgataaaagcattatgaggaaattgtcaagcccaagggtgaggtgaagaattcttagatatgataccaaaagggacataaaggggacaaaacatgatcaatttttaaaatatttgctctggatatttaaatatatatttaaaatatatattatatatatccagagcaaatattttaaaaattgatcatgttttgtattatgtatatttatctatattatatattatatattaatatattatatattatatattaatatattatatattatatattaattaatatataatatatattatatataatatatattaattaatatataatatatgatatatattaattaatatataatatattatatattaattaatatataatatatgatatatattaatatattatatattaatatattatatataatctatatatctatattatatataatattatgtataaatatatatttatatatatcatatatataggatatatatactggatatgtataaaatgaaatattattcagcctttaaaaaatgaggaaatcctgccatgtgcaacaatatggatgaacccagagagcattatgctcagttaaatgagccagtcacagaagaacaaatattgtatgatcccacttatatgaggtatcaaaaaaagtcaaactcatagaggcagagagcaaaatggtgggcaccaggtctgggaggaggataagtggggagatattgaacaggtacaaagtttcagtatgcaaagtgaatatgttctagagagctgctgaacaacacagtgcctgtagttaacgatattgtatacttaaaatttgttaagagagcagatgtcaagttaagcgttcttactacagtaaaagggggggaggggagaggtaggaggaaacctttggagatgatggatgtgtttattaccttgattatagtgatggtttcacaggtatacacatatgttctaaccaaccaagttgtatacaataaatatgtgcaggtttttttatattagtgacacctcaatagagctgttaaaaaatctctgggacacagctgaaagacaatttgaagggaaatctataatattaaacacctaagagaaaaaatgaagggtctcaaatcatgggtcttagtttccacattaaataacaaacctgcaggttgtgcacatgtaccctagaacttaaagtataataaaaaatatatatatataagaaatcagaaaaagaaaagaaacaaaatgattcagaaaaaggatatactaaagatcaaaatggaaatcgatgaaataagcagaaaaaacttagagaaaatcaatgaaactagaagcttgagatcaatgaaactgataaacgtctagcaaagttttatcaagaaatagatgtctccaggtttagagacattttgttgcatgacattgccaaagtgagaatatttacaccagggaaattggcaaacactacaagtcagaattttgttgactgtacagcctgaaaaatgtaatggagaatatgttaataatgcagattaaatttaaaagtatgttgtgtctatagctttacattgtaaacagcacaaaatttgagaaaatattcttctagtatccaaaaatatttctcaacttagcaaacaagtcactaacaccattcatgaatgactgaagtactaacaaatttctttgttgtttcattgtactcttgttagtgaaaacagaaatatctacccaaccaacattcattttaaaaaggcaaaaaatatgaatggatatctcacaaaagtagatatatgggtggcaaaaaaacatacaaaataatttcccaaatcatgagtctttacagaaatgtaagatactacttggcacctcctattggaatggcaaaaattaaaaacactgacaacaccaattgttggtgaggatgtggagaaactggaactcaccaacactgctggtgagaacaaaaaatggcacaaccacttacatttttttcagtggtcttactctgtcacccaggttggagtgcaatggcacaatcctatactcaaatcctgaactcaagcaatcttcccaccacagcctcctgagtagctagctgggactacaggtatgtgccaccatgcccagcttttttttttttttttttttttttttttcattttttgaagagattgaggatctcattgtgttgtccaggctggtctcaaacttccaacctcaagcgatcctactgccttggccaccctaactgctgggattacaggtgtgagccatcatgcccagccctgacctttttccatagtcactacactcatgaaaactttcatcagagtgaactctctgatgtttactgaggctggggctttggataatttctcacatttgctgtactcataaggtttttctctggtgtgaactctttggtgttgaaagagatcagagtagtagctgtcaaatttaaccactgctccagatggaaaggcagggtctccaactcacatctcttaggagatgcactcataaggcctttctccaatgtggatttgctgatgctgagtaaatctcacttgctgttgaaagggtttaatttgctgcacagacttttctttagtgtgaactcgatgcatattgagagtggaggcctgtctaaagaattccccatattctctacacccataaggcctttccccagtgtggactctctgttgctaaacaactgtgaaattgtggctgaaggcatttccaagttgactgcattggtaatgcctttgcatgatgagaaaggctgctgcacatggtatgctcttctgtggctcccccatgctaagagtgacctgatgctggagaaagcctgctgtggctagaaagtccccatcctccctgcattcgaaaggctcttctgacgtgtggttgcttcaagtcttcacaagcaaggtcctcccctactcctttctgatggacttctctatattctctgcatctgttgctggggaaggtttacactcactcagaatcttctccacataccacatgtgtatgatgatttctgccctgggtgtgttatttggtatccagccaggtgcaaagtgtctttcaagagtagaccacatggccaggtgcagtggctcatgcctgtaatcccagcattttgggaggctaaggtgggagaattacttcaggccaggagtttgagaccagtctgggcaacatgatgagaccctgtctctacaaaaaaattaaaaaataagctgggtgtggtagtgtgcacctatagtcccagctacttgggaggctgaggtgggaggattgcttgagcccaagaggttgaggctgcagctgtaccactgcactccagccttggtgacagagtggcaccctgtgcaagaaagagaagagaagagaagaaattaaggaaggaaggaaaaaaggaaggaaggagagagacaaagagagaaagaaagaaagagacagggaggagggaggaaggaaggggaagcaaggaagggagagagagaaaggaaaggaaagaaagagagagggggagggagggaaggaaggaagggggagggaggaaggaagagagaaagcaagaaagagaaagaaggaaagaaagagaaagagaaagaaagccagaaagaaagaaaaggaaggaaggaaggggaaagaaggaagggagagaaagagaggaaagaaagagaaagaaagaaaggaaaagaaagaagaaaagtcaaagaaaagaaaagagaaagaaaaggaaggggccgggtgcggtggttcatgcctgtaatcccagcactttgggaggccgaggcaggtggatcacgaggtcaggagatcgagaccatcgtggctaacacgatgaaaccccatctctactaaaaatacaaaaaattagccgggcgcggtggcgggcacctgtagtcccagctactcaggaggctgaggcaggagaatggcgtgaacccgggaggcggagtttgcagtgagccgagatagcgccactgtactccagcctgggtgatagagcgagactctgtctcaaaaaaaaataaaaataaaaaaaagaaaaggaaggaaggagagagagaaaaggaaggaaggaaatgaaagaaaagaaataaagagaaagaaagaaagaagaaacaaagaaagagagaagaaagaacgaaagaaagaagaaaaagaaaaaataaaatcacacacatggcaggtgtaggttctgggtggaaggacctgcctgggattcctgacaggtgacactttttcaacactatgttcacagagagagcccttgcttaccttccaatctatgccaaaaaactgaaagcaatgaaatgctggtaaaattcttgttagcttgagtgggagagaacagccccatcacaaatgtctgacccaggaatgagcctgcggaattgttcgtaagacaaaggtgctgaggaagtggaaggaagcaactgctgcgcagtagtaagactctcaaagtgacagaatataggaggctttaacagtgccgtgatcttgccagagtcaagaatagcaggatgcagtgcagaaatgatagaggcagggtctccagctcacttctccataagcaccctccagcagggctttggctgctggtaaaacatgagccctaagggtgtgtccaggcccaagaaaaatgcaattgcacctgagttgctggtgttcagggactattaatggaaatgcacatctcacaacccatgaattgtaggctaatgttggagagcactccagagtgagcagtggagagggtgagacatggagaccaggatgtggggtgcagcctggggcccagtgtcagaatagaaatgacaagtggatacagtttcaagaatggggaaggagtgatatggatgaggtatggccattagctttggaacccaaacaatggtgaacagggacaggttactgatatgtgaacctagtcctgatgtcacactctcgtcttcctacttcccaaggccaaggcccctctaaccacctcttgtaatggttgtcatggtgtctgctctgttcaggcacccaggcctattccaccatctccagttgggcaactaaatggttgctaagcactaagggaagcaccttggcaggtgagtggccagcatttgttcagaggaaccactccaccacagactacaggaaagaaaatggaaaacaaaatgaaacaaaaagcctatgaggaatgtcttgcagaaacaagtcggcagtcccagccaaatagtgatcttcttagtgcctgtaattcctggcacagccaggccccaggaaatgccagccaaaaaaggggacagaatctgcacccagaattgccccggaactggacaatcatttgggaaagaaatgactgagctggatgggatctactgggctggcctcaaaacttccctgcaaggccttggggtggcagttgctggggctccttggggagggtactgctcagagaagtgcacagaggttcagcacccacagcacatgtgccaggacagcagagaagtgagaagggcccatgctccagctgtgaggacagagccgcctctggggcaaggggacaggaagaaaccagctcaggtcactagggaagatgtgaagaccttactcagcaaggctataaatgcaaagctgtccagcatcacattatggtataggcgtctctgagcctcgtcaaacagcccccacctgcctcagggaaaactcaatggccatatcctcaaaggtcacacagccctgccatgatggaggctattgactccatgactgtcttctctcctcaggacctcagtccatcttcccatacatacatcccaaacctactctcctccccaacttcccaattcagaggagatatcaggcactggtgacactggtgttcactcccagtttgtaccctgttgatcactgtgtcagcccacattgacaacaggcaggcaggcagatagacaccaaatgtactctgggcctggcatgtggggtcttttaaaatgcacctgggatttgttttaattaggtgtagtgagatgatgtacagacaactgccattgaaagaagattttcttaacttacagttcccaagatcccaagaagaggggccatgccacgccatgcagggctacacagggaaggatcagggtcagagaggaggcaggaagagcaaagagggaagcaggggcaggaggttttattgtggtttcacagaaaggaagaggcaaggcagggtaggtaaactgagcaggctaaggatcgagtaatctgaataattttagtaagctctgggttatatgggtgctccttagttgtccagtacctggccctggagtgatttagggcagggggacagtgtcctgggctgcaggaacctgataaaagcaggcaggtaggagtaggaactcagactggttggctatacatgaatgacttacccacaggcaagtgtttattttctaggaattagctggccctgggaggggtggtctcaccaggatgagcaagcccccaatatgtcaaagcatcagaaaatatagaaaatattttttaaaaaaacatccccttgtgatcaatacaaggggcccaacgccatctcccagtgtcagcaagatcgtacttaccagatacaaacaaaagggctcagtcttcttccttaacctcccagtaccatgggccagtcattaacttccttcccacaggggtagcactcttcagactgcacctgcctcgtaactctaggccccacctgtgaagccccaattgccgctgctacccaactcctggcccacaccatggccatgttcataggctttccacaattccctctgtacatggcatgcaaagagtgcttggcaaatgcaaccaggagctcatcctgcccaagaccccctgtattcatctcccagggttgctgaattgggtggtttcaaacaaaagaaattgattatctgacagtctagagctagaagtctgaaatgaagacgttggtagggccatgctgtcttcagtagttccaggggagaatcctgccttgcttcttccagcttctggtggttgctggcaatccctggcattccttggcttgtggatacacccctccggtcacatggccatcttctccctgggtgtctttatgtcatcttctctctgtgtgtgtctgtctcagggtccacatttcccctttttataagtataccagtcatattggattaagatgcaccctcgggatctcattttaacacgattacctctataaagactctatttccaaataagatcgcattttaaggtactgagtattaagacattcacatatattttggggggaatacaactcaaaatacctttgatggctcccactggcaagggcagcgcccagttccgatttgaaggcctcccaacatggtggtgatcctggcttcaacctcagtcattaaccacacacagatgtttgacacttattaatagatcctctttctcttctgtgttgtgcattctattccttcatcaccatgggtcaccacaaaagcctagtgtgtccagagactggtgaataaactccatcccagatcttactgtaattccacctccattctggctaagcctcaacatccatctcgaatcgatacccccttggaaaatgtggccacttaccagatcctgatcttccccatatgcaatcctcatggccagtgatttgccgaagcaagataaccagtcctcaggctccactctttcctttctttcaacatattggcattgcaccatgaccagaaaatctcctctcctaaatctccacacaactccatagccatccacatactagatgccacaatttggattctcataacccgaatccctccccagcacaccacaactgtatgtctagttgcctgctcagaacctctactcaggggcccctggaccgtcagactcaacatggccaaaacctaacttctgatacttctgatactgccacttaaaatctcccctacaaccaactattccatctcaattggtggcacatctgtcctttccagctgctaagccaaaaacctggggtcacctaacctccttgtccttcttacccttcatgttagaaaatctggtcagcttgacttaaaaaatagatgcagaatctaatcactgcttccatatccattttggtttagcgaacaccacttacctggactattgcagtagcctattacttggtcactctgctcccaccgtatgcctctacagcctgctctcctctctgcagccagagggaccctgttaggatctcagtaagatcacctctctgctctgttcccaaccttcagggctcccagaacattcagaagagagacccactcctcactcaggcattccagggctgccttctgccccctgctctctggtaacatcagtgactccccagtgatgatggaaaggggaaaagtctcagggaaatattatcctttgtatctcagtgccaagaacttgagagtggaggtctgagcagctgaggacctaaaggcccttccacttacctgcactggatccatcaatgccaccatatccagtgagcaacatgaacagggtgggaatgtgagaagcgggagactggggcaggtctgatgggctcaacctgctcttcaatttggtctgtgctgtggggggtgtgcccttgtcagtaaaacattggaacaatatttcccagggccaactggaatgctgtttggccattgtcatggagaaacagatacaggtcacaactatattacccagttatagttgggtgctccaacttgggtgctccaagcctcagactccaccagtataaaatacacgtaaggcccaagatatcatgggatggagtgagggtgcagtggctctggaggatcctggcagaacccccatttcaggaggatcatagctaatgcaaaggggtggaggtaggtcctaacctctgcacagtccttccctgctcagtgctgacaaagatcttctcaaccaaactctaatcaggctcctttgaactctctcctcacctaggccctgatttggatttccatgttgtctctacattgtccatttttagcaagaatcctgctaagtcagcttaccagaatccccccttacctctgacatttcctcttagtgcttttccatttattgacccctccacaccattccttgggtatgaatccccacttgttcttgctgcagttggagttgagcccaatctctctcccaccctagaacaccccgctgcagtggtccctacatctctcgcaagagtcccgctgaatcaagtctgccttactattctttaacaagcgtcatgatttttttaacacctgggaattgacttggcccctgtggagtaacccagcaccaccaactaaacattcacaatggtgtcttgcaaagcccacagcgcctatgtggggtacaggaagtgcccctttcctgggtggaggcacagagacttgtctgggtaatatagttgtgacctgtatctgtttctccatgacaatggccaaacagcattccagttggccctgggaaatattgttccaatgtcttactgacaaggcagggcttttcttcctcctaaaggagccacatctagatttctgtggccacccaagctgatgctccaccctcagaggttgctaataggagactcattccttgaccttcctgcctctgaggccctaggtgcatctcttcagttctaggcactcaataacctacattcaaaatgaaaaatgaagaaaataccatgcttttagggtctttgtgtactaacattaaagactgttctaatccagtagttcccaaacctttaacattgggaccacctgataattttttaaaaatgcatgctccctggccccaccaaaacctagtgaatcagaaactgtggggctggggcccagaggggaattttgatcctggctgcagtttgagaaagggaatgctcattaaaatccagtgaataaaataggtaaaataacaccacatacctcatgggaagtaatagagctttgcacaggacctggcacaaagtcagtactcatgaaatgcattacggctatttttatcatcatcatcatcatcatcatcatcatcatcatcatcatcatcatcacaagacactcacatacaatggctgtgagggggcaaacgaaatgtcccttttgctgggtcatttgggatatctgtcaaaatataaaacatcactcaaatgcatcaagcagcctcagagttaatcactgaaagttttacaagatagtacacctttgaataacactatttggctcctttaaaagaatttatttttaaaaatagatcatgcaggagggtttcataaactgtaggatgaattcttataggccacaggattcaacgcttgagaacatcacagctaattgccctctggccaaagtggagagtggagttgacacaatttcaagtatgtgatggcagatgacaagtcattgttaatctctaatactcagggaattcacctccctccagcctctaggtgcaaatatttgactatgaaatggcacagcctgatgtttactgacagaattatcaggtactgctctcatcaagacttcaacagcccattacttgaacctgcagtcctcaagtgaataccaaattaattaagtcttaggaaagccacatatccaggaagagaaaggggattcctaagcacctactcagtttctagcacaacccatcaatttggccaccagatacatactcattacagtcggccctctgtatccacaggttctgcatccatggattcaaccaactgtggattaaaaatacttggaaaaaatggttgcctttgtactgaataagtatacgcctttttttcttattattccctgaacaatacagcatcacaactatttacacagcacttacattgtattgggtattgtaagtaatctagagatgagttaaaatatatgggaggagtctatgtgtaggctatatgcaaattctatggcattttatattagggacttgagcatctgtggatgcagtatctgtgcaggatcctggaaccaatgtcccatggatcccaaagggcgactgtgtatgatttctcctccacactcaatactcttacttcctcttttctgtgacaatcccatccagtcactgtctccatctcagtgttagaatttcggttcatatcctaacctaagatctgaaggctatgatcaaaatggtaagatatttgtcaccactcactcccaaaatataattgtgactcagggacacagtgaaagggaccaattcaaactgctgaagaagtaactgctaaccaaaatttctacacatagcaaaagtgtttttgaagaaacagcataaagcaaaatgacttcagagcaaaaataagaaatttaatggaaaattaacctgcataaaatgaaattcttaaagaaaattctatttaaggatgacaaaaagtgataccaggtgaaagatctgtgatgagagaagaaatgtggatccagagagaaggcacatctgtggattaaaaaaatactcattatctgtagaaaacgtgacaaatattccactgtgaagttaaaaagatggaattatcatgtatagcctcgataacatatatactgagatgggataaaatgattaatattctaagactctttttaaaagtattaacagataaaattgtatatatttgccatgtgcaacatgatgttttaacatgtatagacattagaatgactaatctagctaattaatatattcctacctcacacagttatcattttgtaatgagaacactttacacccaccctcttagcattttttaagaagactatatattattaactatattcaccatgttgtataatagatttcttgacagtattcctgctaactgaaattttgtatcctttgagcaacttttccacaaagctcccatcccctagtgaccattctaccctttactcctatgacttttttagattccttatatgagatcaggtaaaatttgcttttctgtgcctggcttatttcacttaacacagtgtcctctaggctcatcaatatgtgccacattttctttacccaatcatatctcgatgaacagttaggttgttcccatagcttagctttcatgaataacattgcaatgaacatcagattgcagctatgtctaatgggttaatttaatttcctttgtgtctatgtccagaagagggactactggatcacatggtaattctatgtttacttttttgagaaacttccatactgttttccataaccgctttactaatttacattaccaccaacagtatggaagtgttccctcttatccacctcctcgccaacacgtgctcttttctctttttgataacagccattctaacagaggtgaggtgatgtctcattgtaatttttatctgcatttccctaattattagtggtgttgagcattttttcatatagttattggtcatttgtatgtcttctttagatgctaaatgtctattcaggtccttcccacatttttaattgagttatttgttttcttgctattgtttcagttcattatatattttggatattaactccttatcaaatgtatagcttgaaaatattctctctcgatctgtaggttgtctcttcactctgttgactgtttcctatgctgtgcaaaacctttttagtttgatgtggtcccatttgactatttttgcttttgttgcttgtactttgggggtcatatccaaaaagtcgtggctcagatcaaagtcatggagcatgtcctctacattttcttctagtagtttcacagttttgtgtcttatatttaagtctttagttcattttaagtttatttttgtatatgttgtgagataagggtctaagttcatccctctgcatgtgaatagccatgttttccaacaccatttattgaagagactgtccttttcccatggtgtgttttcagtgcctttgttaaaaatcaattggctctaaatgtgtggggtttatctctgagctctctattcaattaacgatagcttgtcacaaaaggctttctgacatgctttacattcaaaggactttcctccagtgtcctatgatgtacccgcactgtcatgatcattgtagcattattcacaagcatcaacctaagtgtctgtcaatggatgaatgaacacaggaagtacaaagaatgaatgaatacaggaaaaaatgaatacaaagtgaaatgaatacagaaagacaatgaaatattaatcagccttaaaaaaggggggaaattctgtcatttgaaacaacatagatgaccctggagaatattacaccaattgaaataagttaagcacagaaagacaaacactgtgtgatctcatttatatgtggaatcaagagaaattgaactcatagaagtagagagcggaaggcctggggggaggaggagaggaagattagggaaagatgttgatcaatggtgcaaaatttcagttagacaggaggaatacattttagtaatctattgcacagaactgtgactataacaaacaatgtactgtatatcttaaaattgctaaaatagtagattttaaatttactacaaaaatttatattatatatgaggtgatagatttaattagcttgatgtaatccatccacattgtaaatatgtatcaaaatattatgctgtacccccataaattcatattatttgtcaattaaaaataaaattaaaaataaagaagttggagataaaaaagaaatgtgttattattattcattgcagttaatgttattacatgcacaataccaatacaaatagctaagtcttttagagccactgtgtttcaggcattaccttatacagttccatatattatctaactataccatcagacaatccaatgagatgaaaagtattgaaaagtcttattaccaccatttactaaatgtaggctaagtgtacagaatgagatagatgttgaccaaacccattttctctcctctttgggtacacagctataccacctcctggctctgagaatccaggtgcagccaaatacccagtttttgtcaacagagtggcaacagcaatgtatgggtgcaagtgggcatgacttctctttctcatttttcctctgctgacagataatgccaagaaagctttaaattgagccacatgttgacaatagaatgtttcttattccctgaataactgtgtggtgcagagctccttgctaacctgtgtggacctgtgtggatcttgaatgaggaaaagaaaaagacaaaagccaaaaactctccttgtgctgggctgctgatattgtaaagtgtttctgtgttacaatagccagcattaacttagccagcttttacactgatgaaatcatgcaacatctcacaaggctggagagtggcaatgtcaagtattaagcccaaagacatggaacttagagtttgattttaacctaatacaacctacttctcccccagtagcagggaagtgtataagggggtaagaggatggtcaaaggactgtatggatcccaagtccccagggaggtcacaacaagaggcttcccccttcccaaaaagaggtccccaattgatctacggagttcagggactcccacctgcccagctcttggtcacctacctggacaggaactttatgagaggcctctcttcaccacacaataatcttgctcattttccatcaggtagctcagttccaattttggaagaagataccctgatcatggagaaataggacagcaatatttgggtaaagataagaatgacgctctgtattcagtatggtgttcaagacaagaggaggagcccagaatgaggctgctcccttccatgcaaagaaaatgttgacctgtaacctggaaaccaacagcacaaaaactatccttgagccaagagtctatagagggttgtgatgaccatcaatgtaacattcatccccctcaatctccatcctacagaatccaacactgttcatgggcaagcccttccccctttaaatacagccatgggaccctgggaaagtgacatttcataacagaaactattttctaattaacttaagtcagtgggtctcaacctccctgaacaaaagaaccacctggggatgccttgattatgggccaaatggaacaaaatcccgggatgaagcatggacatgagcagctttaaaagttctccaggtgctcagggaggattgaaaagtgtgggtctaaattgactgatgcctgactttctgctctgtttctatgtttttggaaaatgttgggagttctgctattttggagctatgatttttgagggtgcaagtgaggtaaagggaatctgtataaaccaaggaaca[139 bp omitted]cggtgaaaacccgtctctactaaaaatacaaaaaattagctgggcgtggtggcgggtgcctgtagtcccagctactcgggaggctgaggcaggagaatggcatgaacccaggagacggagcttaccgtgagcggagatcgcaccactgcactccagcctggatgacagagcaagactctgtctcaaaaaaaaaaaaagatattaatcctcgtgctatgaatctcacaaacaggataccaagcgaaagaccctggacaaaaagccatgcatgccatgtgaatccatacacataaccttcaagaagaagccaatccaatgtatggggatggaagtcagcacagtgacgccttttgggggaactgactgggagatgcagggggagcctgctggggattcagaatgcctgatagctcgatctagtggaagttactgtaagtggggacacagattaaatatgaattgaaatgaacacttaggactgaacattttgctgaggtatgccttatggtatacctcaaattaacaagcatattaaaacaataagtcatgctcaaaaatgttattgttctctttgggcagcagcttcctagagggaagccaattgggtctagagtcagcagctttggggaaaagcccacacttcaccagggatgttgtgagggctaatcagtggagcagggagagtgcctggaacagggcctggcatagggtcagtggtcaggggacgttggctgtgaccattagtataaaccactattctttaagttgacacacattttgtttacttgaattggtttcttcataaagggaatcttgtattgcttataaatgggaaaactagtttcacttttcacaaatcagtttccatcaaaatacaacaatgaaataaaaataatgctgtaagttctggtaagcttatgtggcccaccctgtgcttctgatgtaggtgaaccccagaattggggcttggcccaggagggttcttggttttgtgctggaaagaattcaagagcaagctgacagagcaaagtgaaagcaagtttattagagctacagagggcaggaaaatggctgctctgtagcagagtagtagcagaagccctcgtggattgctggctagctatatttatggctattcctgcattatatgctaaataagaggtgggttattcatgagttttctgaaaaaggggtggaggttccagtaactgagggttcctccctttttaaaatcgtatgtattagtcagttttcacgctgcagataaagacatctccaagactgggcaatttacaaaagaaagaggcttattggacttacagttccacatggctagggaggcctgacaatcatggcagaaggcaaggaggggaaagtcacatctcatgtggatggcagcaggcaaaatgagagcttgtgctgagaaactcccatttttaaaaccatcaggtctcgtgagacccattcactatcacaaggacagcatgggaaagacccctccccgctgccccacgattcagtcatctcttactgggtccctcccacaacatgtgggaattataggagctacacgatgagatttgggtggggacacagagacaaaccatattactgtataaggtggcttctgggagttgcatggcatttgtaaactgtcacggcactggtgggagtttcttttagtatgttaatgagttataattaatgtacaatgagcaacgagggcaacatcttggttttagctggttttggccagtttctttgctacatcctgttttgcttagatactgttttgatcagcggggccttgtgactggtgctcagaaaacaagtcccactgatcttcgacctcattcccccctcagagattatatactcctccttaatctttttttttcttttttttttttgagacagagtcttgctctgtcacccaggctggaatgcagtggtgcaatcttggctcactgcaacctccacctcccaggttgaagcaatcctcccacctcagccttccaagtagctaggattacaagcatgcatcactatgtttggctaatttttctatttttagtagagacagcgtttcaccatgttggccaggttggtctcaaattcctgaccttaagtgagccactggcctcagcctcccaaagtgctaggattacaagggtcaatcaccatgcctggccctccttcttaatcttaaggggttgtagaagggtagaggtccatcttctgcaactgcttcttgctgatcttatgggcataggtcctgcctagctttgaaggagtaaaaatctctgaatacctgatataaggggcccaaagcaggatgtctttattttctgggtcagaagatgggatgggttggaagccttgtgacatcttcacatggaatttatgtaatctagaagacacagactttactaagaggttaaacaagcaagggccaaagatcagtggtaacagagctattaaaggccatagtaagagtaaaaaccatgtcgtacttggtaggtatcctttgatggagtctcagatggtttgactggtggggttagtaaaattatgtagccaggtggcctgctagtaaatctttatttttcttttttgagacaaggtctcactctgtgacccaagctggagtgtagtggcatgatcatgctcactgctgcctcgatctctcaggctcaagcaaccctcctgcctcagccttccaagtagctgggaccacaggcgcacactaccctgcccagctatttttttaaatttatttttcatagagacacagtctcactgtattgctcaggctggtctcaaactcctaggctcaggtgatcctcctaccttggcctcccaaagtactgggattacagatgtgagccactgtgcttggccttggcagatattttgaacttgcagttcaattatccctgaattgttaacataagaacaacaggtatgacttactaccacacatactcctcattgttcagccagaagatagtctagagccaatctgctgtctaaggcaacattggctagggagtacagggaggcctggagtccacttacggcttttcctatacttcctgcctgtgtttcaagggtttgagtacttatctgtgcattttcttttctttttctttttctttttgagatggagctttgctcttgttgcccaggctggagtgcaatggcacaatctcagctcaccgcaacctctgcctcccaggttcaagcgattctcctgtctcagcctcccaagtagctgagattacaagcatgtgccaccacgcccagctaattttgtatttttagtagagatggggtttctccatgttggtcaggctggtctcgaactcccgacctcaggtgatccgcccgcctcagcctcccaaagtgctggttttacaggcgtgagccaccacacctggcaatctgtgaattttcaaaacaatagctttaagtcttctagggtttcacagtgtagctcttggtgtcctcctcttgtgcctgaggggactcataagaaacaggtttatttaatcctggacaggtatacccaactagtgattctgtgaagtttaatagcagtgggggtgttcaacaatgcctaataggagcccttcaatttttttttttttttgagatggagtctctctattgcccaagatggagtgcagaggtgcaatcttgactcactgcaacctccgcctcctgggttcaagtggtcctcctacctcagtcttccgagaagctgggattacaggcgcctgccaccatgcctggctaatttttatatttttagtagagacagggtttcaccatgttggccaggctagtctcaaactcctgatctcaagcgatctgcctgcttcagcctcccaaagtactgaaattacaggtgtgagccaccatgcccagcctttccaagtttttaagagggctaaatatcctgggtgaacaggggagccattcttttcctctgtgggaaagggcaatgctttatttccatattcttggagagctttttgaacctggcccaagttgatagtatgagtgagcattttatgtctcctcatcaaacaggaggtctgaagttaaaaagggcctcccatagttcatttcaaatgggctaagatttaagattccctttggaactatctttatgcacaaaacggctatgggtaggagaggcccccagggtctctggacaaagttttgctgacgtccttttaaaaacatggttggcatatctccaaatgctatccctcccccctccctccaccccacaacaggccccggtgtgtgatgctccccttcctgtgtccgtgtgttctcattgttcaattcccacctatgagtgagcacatgcagtgtttggttttttgtccttgcgatagtttgctgagaatgatgatttccagcttcatccatgtccctacaaaggacgtgaactcatcattttttatggctgcatagtattccatggtgtataggtgccacattttcttaatccagtctatcattgttggacatttgggttggttccaagtctttgctattgtgaatagtgccgcaataaacatacgtgtgcatgtgtctttacagcaacatgatttataatcctttgggtatatacccagtagtgggattgctgggtcaaatggtatttctatttctagatccctgaggaatcgccacactgacttccacaatggttgaactagtttacagtcccaccaacagtgtaaaagtgttcctatttctccacatcctctccagcacctgttgtttcctgactttttaatgattgccattctaactggtgtgagatggtatctcattgtggttttgatttgcatttctctgatggccagtgatgatgagcattttttcatgtgtcttttggctgcataaatgtcttcttttgagaagtgtctgggaacatctgtatgcagaagtacagtatacagagataagaatttacaatatagtgtgtgcatcagcaatttctaacagagccttaaaacagaaacacagtctatccataacctatatttagtaagatactaatcagtagtaataattgcagcaaaagctgattgcaaacaatcaatagaagcaggatgtgaaactagacaaccagttagaccacaaaatctcagaagggagtatgtcttaaccctaaagagacctagaagagtcgtggcaagataagggtgtttatagccctatcttatccgtatgaacaggcgcccccatgcatccatttataggctctccacaagggtcgcattccattcccagagctatgaacatctgcttttctgggataggaatcttggtgatgtgaaacctccctgactccacgtcggtttataggctctctgcagggggaaacacatcatgtgctgttggctcattctggcagtcccacctggcattgtctttacacaatcctgcatgcaattttgtatttacaataatcaggagcatttcatcttttattccatagcaatagtttcagggggtctccctacaattgtattagataaatgcgttacaatcaagatttaggcatcagatgtgctcattgctactggggtacaatttctttgaggccttctcagcgacagagcaaagaaatgtatgtgtatatactaaccatgcatatgccatctgtatctatattaacttaaacatgtattcttactgataattccaactctaatctggtaccacagagatcattctagcatcctccccttgctaatctataaattcctactccaacagtgaaaacctggctcccactgtccagcatccatttatttaatagttcaattccagtatacatgtatagcagtatcagaattgttcatctgtaccctcatgtgaaaactttatcaactagtgtacactgcatatttgtagttcattttgcctttagtcttacagactccattcatttctaaagttacttaggtcagcacctttccctctactccctctgtgaagttgcctcatacatttgtaatacagatagatttgcatgttacagcctaaattattttctgggatccttcaacctctgaatttattacattaatttgcatacattaaggttcactctgtgttggacaggtctatgagttttgacaaacgcaaacagtatcattgtagcctcatggccataaaaatcccttgcatttcacccattcaaccctcccccaatctcctggcaactattgatcttcttactgtatctgtagtttgtctttcccagaatgtcacataattggaatcgtactatacacagcacttttttttttgagacagggtctcattctgtcacccaggctggagttgcagtggcatgatctcagctcactgcaacctccacctcctggactcaagtgatcctctgacctcaacctccggagtagctgggaccacaggcatgcaccaccccatcctcctaatttttgtattttttgtagagacggggttttgccgtgttgcccaggctggtctggaactccatagctcaagtgatcctcttgcttcagcctcccaaagtgctgagtttactggcgtgaaccaccatgcccagcctcatactatacatagcattttcagactgacttctttcacttagcaatatgtgtgtaagaattctctgtcttttggtgtcttgatagcccatttggttttatcactgaataatattccgttgtgtggatgtacaactggtttttgtttcctttttatccattcacatacagaatgacattttggttgctttcagtttggggaaattatgaaaaaaatttgcaatagtcatccatatgaaagtttttgtgtgaacttaagttcaaaatatgaagccctaaccccagtgtgactatatttggagaaagggcctttaaggacctaattaatgttaaattaaataataagtgtggtgctctaacctgctaggactcatgtccatataagaaaaggaagagacaccagagattgaggcctccccttttcctttctcttccctgtctaccccacagaaccatgtgaagtcacggcaagaaggcaactatatctgcaagccagaaaaagaggatagagggccaagagaacagagctgctgttatctactgaactgggggagacacaattcagttggtaacaatggctacaccactttgcattcccagcatcctttatagagttcttccactctacatacttgtcagcatttggtattgtcagtttttaagattttagccactttaatagatgtgtaggctaatgtcttgttaatgtcttcattatattcccgaatgacatatgatgtgcatctttacatatttatttgccctgtgtatgtcttctctggtaaggtatttgttcaggtcttttgaccatttttcagttgggtcgttttgttttctcactgttgagttttaagttgttcacctcacatattttgatgctttgttatgtacatacacattaaggattattatatcttcttggagaattgacctctttatcattatgtactgcccctctttacccctgaaagtttccttgctctgaagtctgatattaatatagttactcctgctttattttgatgaatgttcacatggcatatctttctccaccccttaacttttaacctaccagtatctttatatttaaagtgaatttcttgaagattgttgggtcttattttttattcaatctgacagttcagatctttaatttgtattaagtttctactgacatatcttcaagctcattgattcttttttccactatgtccagtctactgatgagcccttcgaaggcattcatttgtgttaacaatgttttttatttctagcatttcctttgtttttttttttttttttttctttttttgagacggagtgtcgctctgtcacccaggctgcagtgcagtggcatgatctcggctcactgcaacctctgccccccgggtccaagcaattctcctgcctcagcctccagagtagctgggattacaggcgtgcaccactacgccctactaattttgtgcttttagtagagacggggtttcaccat[133 bp omitted]tctacttatattacccatctgttcttaaatgttgtttacgtttttccaatagagcccttgctgtatattcatcagttattttgacccaatgtgtttttactacttttatcagtccttccacctctgtgtggtaaacatgagcaccttctccatatcacagtcagtgatctgaggaagttgtccagagtatctcagtctagtgagcaggggcaggatttgaatgcaggtctctctggtccatggtttatgtggataaacctcatactcttccactatcacagtaacaaggatgtgaagcatttctaatatctgttgctcctaaattcatttaatccatccctgaagatatttctgtgtacatggacagagaattttccatttttgctgcattaataagacctttctccagcgtgaattctttgttgttcagtaaaactggaactttggctaaagaatttcccatgttccctgcactaataaggtctttctccagtgtgaattcactggtgaggaacaagtccatatttgcagctgaaggttttcccacattcacagaactcataagccctttccccaatttggactctttggtgtttgacaagtaagggtttgtatttgatagctttcacatatgtgatacactcataaagcccttctccactgtggactctttggtgctgaacaagtgtgtgtttgcagtttatggctttcctgagttcactgcacttctcatcactttttcactgtaaatggctgccccacactcagtggtgctgtatggcttttcctgttgtaagtggcctggtgctggagaagtcctgagtcaaccaggaagtaccttccaaccttctcaaaggtaaaggacttatttggcacaagaaatctgcagcccttcacgaaaaagctcctatctacatcccttctgaagggtttctctttactgaaaggatcattttccacatgcccctaagtatacagtttcttcctgggatattttcccctgtcctcagcaaaaggcaaaatgtctttcaagattaagacatacatatcacaggggtgggctttctgaggaaagggcctcagggggctctgacctgtgacaattcttttacagaaaatcttggctgagaagatgcttcctcatctttcacttcatgccaataccctaaaagcaaagacatgccagtgaagtgcacgtggactttggtgagaaggggcactgacatcacaaatgtgtatctgcacaccaatgcatgagtctatgtgagttcacaggactgttttcaggaggagagagtttgggtcagactgaggaagcagctgttgtgaactcatagttttcaaaaagtcacagcatgggagaagcctcaccaggcaaaggacacaaggatgaggtgcagcacaatgaggaggagtggggtctacaactccctcctctgccaatggtttttggtacttgtatttgctgatgacacaagaggtgtgcagaaaggtatgtccaggcccaagaaaatccaatggcaaaagagtggctcacgttcagagactacttaagaatatgtgtgcatctcacaacacagtatgtgtgggccagtgttggagaacactgtgagagggagtagtggacaggagtaggtaagatgtgcaatacagagagttggggattagccctgggacaaaagtctgactagaaatggcaagctgctagtgtcaagaatgggagaagaaaggtagaaatgaggtgtgaccactggcattggcaccaaaatagtagtgggaacaggactggttcatggtatgatttgaacacagccctgatgtcatgccctctcacctgccacttaatagggccaggacccctctgagccgcatgtccccactaagaagcacccatagctcttccccctgctcccagctgagaatagtacctggataatgcaagaactaaaggaaaaactgaagaagggaggagccagcactggcccagggaaacttggagcaacagactacaggtaagaaaaccaaatgttacaaaaacaacctcagaggaggacataaatagtgaccatgtcggtaacagcaattcctggtataggaagacatggggatatattagctagaggaagggggcagaacctggggcggagaggtcacctggccagggaaagggaaaagtgggcttataaaggctgacggcaagactcctgatccccttcccagtaagcctttggggcagcaggtattgaggctgcttgggaagaggataggacagtgcaatggctcagccccaccaaccagtgaacctacccaggaaactgaggaaggaagtagagtccattgtcctaatgtgagaaggatggatctgtccttggggaaaaggaaaggcagaatctagtctaaagtatctgggtgggtgtgagggtctcacccattgaggccatcagtgaaaagttctcagcatcacactgcagtataggagtttcggaacatcatcaaggagactccattccctccaggagaagtgcatggccacttcctcaaaggtcacattactctgttatgatagggacagatgaaaccatgaagagcctctcttgaggacccccagtacatctttctataaatccaccccatattcatactccttccaagatccaaaacccagaggatgtatcagaccttggtgtcatttgtgcctactccctcctatcacccattaatcgctgtgtctgtgctcaacaataagaagcaggtgggcagacagacaccatttaagttccaggcctgccacgcagggccccaccccttcttgccaagaaattaccaggaagtccctagatggtaccttccaaacacaaccaaacttgggctcactcttcatccttaagtcccaaataccagagccctaggacacactccctctccatgtgcacatcattctttaggctattcctctctcatatctccagatgtcatagatattgctatcttcctatcccaaactatagatccctccctagcctccccacatgctactcaccacatggcatcaagaacatgcctgacaattcagacagaatctagtacttccccaagacctccaatggctttcactgccaagggcaacccttaatcctgctaagaaagcctcaccttctggctgtttcatcagtcaatctcagccatccagaacaacatgcaggttttagatacctccccgcaaactgctgccctcctaatgcctctagcagacaaccacatttgcccctgtgctaatccactatcctggcgagtccgtagagctgtgaagtaaaggccctgtccttggtgccatctttcttcaattactcctatgcttctgtatccacatgaatgtctattcttctcttagaagccctggcctcctgccagaccctcttttccccagacccaaccttcaggctcagttctctcccttcagctgtgcctgtgatgcccaccacacccaaccaggtgcccaagcaatagatccagtcctcggccctcactctccccttcttggccagctgaaagctgaagatcatgacctgaagatttcttcttctaaatgtgatgcacagcttcacctcaagtctacaaagtggccaccaccttctggatgtctctattctgaatgactccctagagttccagacctttgtgtctaccagtccacttgatgtcttcactcagtgttctctgaaatatctcactcttcacatggccaaaacaaaactcccatatacccactgaaaattacttttactactaacttctccttcatttctgtggagtcttaattaggcaaaaggaatcaggctggcaggacgaggagaaaccgaaaagaaaaagcagataagctccaagtctgcctttcttcatggtccaggacacacagccctcctgcacaaataactcacaatcttcctgtgcccacctatcaccagacacctgcatgctagctcactgcaaccatagtgttatcggtattgcacaaaaccctcttcagcacacagcataaacactatcctataaaatctcaagcaagcctttgtttcttggcagtcagcttctcttctgctgatcctgcctatgggcaacatatcttcctactttctctaataaatctgcctttatttacctacaattgtcttggtaagtacttttactgccacaccactggcccagacagtcactgctcacctatgacacttccttccaaaactttggagtaatccctaagtgctacctttttttttttttttttttgagacggagtctcactctgttgccaggctggagtgcagtggcacaatctcagcctgctgcaacctctgcctcccaggttcaagcaattctcctgcctcagcctcccgagtagctgggactacaggcacgtgccaccacgcccagctaatttttgtatgtttagtagagacgaagtttcaccatgttggccaggatggtctcaatctcttgacctcgtgatccacccgcctcggcctcccaaagttctaggactacaggcatgagccaccgtgcccagctgctacctttttttctctcaccctcaacattagaaaatccagcattcagccctatttttaaaaaaggtctggaatccagccactttctccatttccagataccaccaacacttacttagattattgcagtagccccatccatgatcttcctgcctcctccctcactctcaaaatttgttcagtctgcagccagagggagcctattaagacctgagtcatgtcacctcattgctcctatgccattgctcccatcaactccagaaaccacccaacttctcagactgccattccagatctgacccctactctcctgctagcaagaaagagaggagatctgtgattctctgaacactcccttctaagccttaccttcaagcatttggagatggtggtacctgtgcttaggataaccttccacacctcatcctattggttgctagatatacataggaactattatatatactacctctggccgaggaccctgggcttggggtttctcaagcaaccccagtctcaagggctagaagagtcacacacaggctgagtcccaaggcaccacaatcctatagccacgtggatggaaggttgggaccagtgagggctcactcacctgtgtatgatccataagcacttttgtggccacaggaacctgtgggaagaggtagaccttgagaagcaggcaactatgggaggactccatgggcttaggcctctcttgaacatctgcccagtggtggaaacaggtgaccttggactgactgtacaatctctatatttcagtcctcaataatgccttttacctgctttgtaactttgaacaagtactcaatctccctgtacctcactgtccaacttgcacctcatccagtcttcttcctccaagcagcttttgggaaactttaaaaccttaactcagactgtgttcctcctcagttcacaaccctgcatggctccaagcaccatcagaaagtgaaaccgtgccccaggggtagagaatttgttaactagcaaaatttcctgaacttgttttgcagaacagtagaaaagtaaatagtttcccacagtcccctctgtttgcaacaaagttggctgatgagctgagactgcttgggaccaatatggctgactggagtctgcacagaatagacttatcagatgagtgaccttttgatgttagagggctgaaaacacctccagatcatgctaacaccatttcctgaacatatgacccataaagcagcatgtaggggcaacagtccttgcccaagggactctccaaaccgctttgtcttccagccaatcactgtccagcccaaaaccccaccctcaaaatctctccctcaaatctatggcggccaagctggtacaaggagacagactggcctcctgcctccttgactcttagtaaacctttattgctgcaaaaacccaatgctttggtgtttgggtttctggtgtttgactttcctttgtatatgggcaaatgggcccagtttggttctgtgacaaatgaaggtacaacaccttgtcactgcaggtgtgacttctcttcacactctactctgtgtacacacagcccccaggccagcccagttgtgcctccaaacctttgcacatgctgatccctcagtctgtaacaatcttctgtgactcaccacactggctttcagaaacggcttcatcacccatgagctctcccgcttcccccagcctaaacaccagggcctagactgaagtgacctgaacaggttcccacaatgtggggcttaagatttgaaagtaggagtccggcgggtgagggcccaagggacgcaccaccaacttgaagccaccgtgatgcgagcctgtgggtgaatggctccagaaactgcggtgactaggatggggacagccacatggcagcctccagcccagcactgacacgagatcacaatgggtggcaccctagcctagcgtcagagcctcagtcttacctctgtgcagtagggacaaggcttcctgttgccttcgcctccttttccctcagacctgacccagccctctgtagtttctgaacaggtaaaacagctgcaaggcagccaaaatgaccgccacaaagtgagacaggaagtcctgaccatcttcacccctaaacctggaatctcccatctttctgtgctttcattggataagcactgctgccactcagcagagaattctgggtaagggtcacatagctctcacacctccacacagtgaagagctttcccttgcagccacgctgtcttgaataaccctcattctcaggctctgggatggggaagtagctacatctctggacgtgtccagcaacgatcaccaaagttttgagacattatttcagactcttgaagctcagcatgttcccatgggccatatttctgatgttcccagagattacaaatccaaatggaatgatcattccatagtgttactgacacccaaagtatggccacgcatagctggaaactaattaccttattgatcttcaactgactgtggcctgaacagttagagtcagttctgtgaatttctgtatgccccttcagggagaagagaaaaaagcctccagatagggccacaatagggaagacagaagaatgatgttgggctgcccagaatcaagtggacaagggtggcaccaaaattttctggttttctctggagttgcccagcgagatcctctgctctccaacctttagggtgagaatctgctggagaagccacgggtggaaatttccgaggctagtgaaaccactcctataaacctttaaaaatgtatcagggaagaagggagaaatgaaaataagccaaggttgcagcacattcaacattaaccattccatcagcttgctctctgacccgcttttttatagttgttttgtgctgattgtcttcaaataatgggggttcaactttttggctccctgggccacattggaagaagaattgtcttgggcaatatgtaaaatacactaacactaatgatagctgattagcaaaaaaaagaaaagaaaagaaaagaaaaaaggtccttgcatgatttttgtgatatctgccaccacagataagctaaaaattccttgcattcaaagactcgaacacctgtgaaccctgttacaagattataattccccttaactactccatagataacaacttgaacattaggaaacattagggtttccctttgagatattccttgagatccggcataccaatgaaactactgactcagctggtctaaagaatgccacaggagctgactcatcaaagaatgcaatttccacatcctgatgattttgtctccctaaccccaacaaatcaatggccccaattctccagccccttgccttccatgatcttaaaaatcccagccaagaacttctagggaggtggatttgagagtccccttccatctcctttcctggcgccctgtaattgataaactctttctctgctgcaaacgctgctgtctcagggtaatgagtctgttactgcacagcaagcaaatgaaaacctcttggtcctataacactagtgagcctgcaagttcatgggcagctgcttgcaaaggttctccttggccaagagagtacacagcctgtgaagggaatagtggaaacccaacctctggagtgaaagatcaagactaagtcctctggactgagatcctgaatgacttcctgagtgaatggtagggactagacttttgggcaggaactggggggctcaagtccagcctgggtcagcaccagatctctgcagtgttgtgggtagatgtgcactggtgagggcataggggccccttggttctacctgggctaccctgccctcactgtgggctgccatgagttgtctgggcatgtgtagtcatcaagggtgttgtatctctcctcgccaccattcctagccagactcacacttcctctctttctttctctctcatggttccctatgaggtgtgaccacagatcagatgtggatagaacctaatggtcaacaccagagtcatataactccctgttttgcatgtgctttctttaaactagccaattcacaacccccacaggaaagcataagggataatggacctgatagggtttggatttgtgtccctccctgaccaaatctcatgtcaaattgtaatccccatgttggaggagggtcctggtgggaggtgattggatcatgtgttggggggacttcccccttgctgttgtgatagtgagtgctcatgagacctggttgtttcaaagtgtgtggcacctttccctttgctctcttcctccttttccagcaatgtaaggcatgcctgcttccccttcaccttctgccatgattgtaagtttcatgaggcctcccagccatgcttcctgtacagctacagaactgtgattcaatgaaacctcttttctttataaattacccaatctcaggtagttctttaaagcaatgtgagaatggactaatacaggaccttaaggcccatggaccttggcaaaggtctaatcccacaagtccttctcccctccaccacccccgacccgctgcacctggtagttgagctccttttgcctccagacatcctgttgcctccccctcccctgccattggcaagcctaatgtttctgggacttgtgcataataaatgtattctgtttcatgcgtcttggtttcacttccttattgtgtctcacctgacacacacctgaatgtaacttccacctggtcagagctctcctagagagtggctgtcttggccaatagccactccaacagagggatctcaagaccaaatagaaataaaccataacaaaaatcataacagaggtaaagatgttgggtctgtgatgtctactagacatctaaaaataggtcacaaatacaatattcttttactttaaaattttttttcttttgttctacacaaatacaaagagaagacaagaagaaatacaatattagatatatgaccatggagtttggaagacaagcctgagatggagatatacacataattttttggcttgtagtggtgtacttgcagccacaaccttggatgagatcaccagtagaatatgtgtagattgagaaatagatcaatttggagagaattggtatttatgcatggcgtctactatttctactaaaaatacaaaaattagccatatgcggtggcacacacctgtaatcccagctcctcaggaggctgaggcatgagaattgtttgagccaggaggcagaggtcagtgagccgagatcacgccactacactctagtctgggcaactgtgtctcaaaaataaaaaaaaagggttccatctccaaatgcggtcacattctgaggtgctgggggctaggacttcaacacatacattttggggagacacaattcatttcatagcattgggaaatataacatacatatagaaaattatttattatttatgtagattttaataaatttttcttaagttgatactgatgtaactaccactgaaggcaatacagagtattagtgtgctcagagtcctgagtgctctgtctgggtcacaatgtgctcctccctcaacacccagatgaattcaacatcccgatttttaaaatcagtattatctgactttttaaatagttttttctattgtgtatgaatctccaaaatatagcttatatgtggctgttactgacctttacatgaatggaataatatgtgctctgtttggtttgatatcttctgcaaaataaatgtaagattcactcagggtgttccatgtatccatgtatctctgtaacatccattttcattgccattgaaggaacaatttatctgtccaatcttttgttgatgtgcctttgtattgctttcagttacttgcgataatgatgttgctgtgaaagtttttgtccatatattctgatgtacataagaatggctttggttttttacacttttctttagcatctctcttgggaagatataaatatcttaaatgtttatgttttaatagcagaatttcaacaggcaaaaactgaccaaaccaaaggataacagtcaaattacaatcacaattggagatattaacacttctttctcacttattgttagaacaagcaggcaaaaaacaagagtgcaaaagatttatcttgatttagtggcatttgcataacactatatccaacattatttgaacacacattctttttctagtgaatatggaatgttcatgagggcaaacatactgggtcaaaaaataagtctcaagaaatttccaaagattgaacacatacagtgtattttctctggctacaataaaattaaattagtaataaataactgagatatctagaaagtcttcacatatttagaaataaagcaaaacgtacttttatataaccaatgggtcaaagaagaaataacaaggagcattagaaagtattttgaactgaatggtgattaaaacatgacaaataaaaacttgtggaatgcagtcaaaacagtgcccaaggtaatattgcaactttcatgtttatatttaaaaataaaaatatctaaaaataatgattgaattttaaatcctaaaattagacaaatagaaaaatgggctaaatccaaaggagaaataaagaaatagcaatcgtaagagtagaaataaaaagtatgtaatagagaaaattaacaaagctcaatacagatttttaaaagagattaataaaattgataaatctctgccaaaattgatcaagaaataagggaaaatttaaattactaataccagagaaaaaagcaatgccacagatctggcagacaatgaaaggataataagtgattatcaacatctttccaggagggaacttgtaggtacaaataattttcctggtgaattatgtcaaacatatacagaaaatattttaccagtgccacacaaactctcagaaaatacagaaggaggcaacttttcctaattcattctatgagactagcattaccataacaccagaaaatagtaataaaaaaatgtacagattaatatccctcacagacatagatatgaaaaccttttaacaccacttcaggaaatcaaatctaaacaaatataaaaggttgttctagcatgtccaaatggagtttgttcctggaattcaaggctggtttcatatttaaaataaatcaatgtaatttaccacactaagagaataaagaagaaaagccatgtaagtatctcaaagaggtgggaaaagtgattgacaagatttaattgcttttcaaaaaacaatatctcagcaaaagtaggaattgaaggaaatttcttttgtctcaagacaaaagcagagctatgaagtaatcataaggaattatgccttgagacacacagcttttgtactagagtggatcctgcacccaactgatgagcagcttgtgttcttgaatctgggaacagataggttatagacagctgtgtggtttgctgcaaggctcagtgagaagacaaatgcctgatggggttctgctgacaattgttgatctccgtcccacatcttttaaggagactggagcccagtgtggcctgtgggtcccttatgagttgaacctttagacctcccagtaggcagtggctgtacttattacagatgtgcatggtgctaagtactctgagaactacaaaaatgatcatacttgatgcacatatgatggggaggcaccacagtcaggtggttaatgcatgagctctggaatcagacagaatgggttcaaatcctggcttctccactaccttatgactgacctgagaaaggttctaaagttgcaaaaggaagtgaaaccaaatttgccaaaggaagttaagagaaacctgtctgccaggaagagatattgtggagtgtggcatctgggcaggagggcactctgcccccacctcagaacactttgtatcccaggtgatgctggggactcaggcctttccaaggtggccataaagaaggctcattttgcttcaggatttggacaggtgatagacagatcctgttttgtttgtttgtttgtttgttttaaaggtatccccagactatatctaccagcatggagatggggtagggtacagaggcaaacagatgtcctctgtggtggctgcctaaaaggaagaggctagggtaagtttagcacatgccctgttgctgccatcctgagcctcctgagtgcctcagtatctgcaagactgagcaaaaccctgtttcttcccatccttgactctcttactctgacctccagtgagctgggccctcactctggcacaatccaggttgctccagccctctgactttgagcagattctgccctcacgtgactcacagagaaagggctagtggattcccaggcactggttgctgaagctgcctctccaggccaggagttgagaagcctgcagtcctggtgccctggtggagccagctctgctggaactaagtacccacagtcctgaacagttcccacgtagcatggggccccatccagtggcaaacatctgcaactagcaggtggaagttccaaaggaacagccagaaagtctcactggggaaaggcccctgggtttccacctttgccctgtggtgactttccttcacatcctttgcagtgcaccctctgtcatgtagcccagggaggcatcacaaatatcaggatgaagagtgcatggtttgccttggaagattaggtagctaggaagcatctccaaactgcattctacatcctcagtatcagataggtatgccctgcttttcaagggcaatgcttttaggaagcttctcccccagcctcactgaatgccagtcccctgactatcaccccactggttcatccagaccactgtgctcctccctcacttctacagatacctcagtcttcactgactaactgatatggtttggctctatgtccccacccaaatctcattttgaattgtaatctgaattgtaattcccatgtgtggagggagggacttggtgggaggtgactggattgtaggggtggtctcccccatgctgttctcatgatagtgagggaattctcatgagatctgacggtttataagtggcagtttcctctgcactctctcctgccaccaagtacgacatgccttgcttcccctttgccttctgccatgattgtaagtttcctgtggcctcccagccatgtggaactgtgagttaattaaacctcttttgtttataaattacccagccccacatagttcttcatagcagtgtgaaaacagatgaatatatcaacccatcattaactggccaaccttatcacttccactgcccagtcagcccatctgcagacttgacctcccagcctgctttgaacctttgagatgaccgacatggacactactattccctgggtctcatctcctggtccccccaggacccagggttagcctggaagactcaagctctgggctaggtttcctctggtcttggaactcccatttgactggctcattgcagtgtggagtggacagccccctgcaaaaggcagtccccactaacccacctatgtttatggtaaacagccctaccccactttgaacctttcctttagcccagaagccacctctcagtcacatttggagctcctaaagggcagcagcaaagagtcagtcttctaggatacctgtctgcaccatcatacttatcactacttcagcaattgtctgttttctagtagctaggaccttgaccaactgggcagccaagtctgcctttaactctgatgaaatcaatatggttaccatgtcctctttctagcctccccctggcaggatcccccaatgtatttgatagcatttaccctttgagaaacgtaaaatctcaatacaagctctaaactgagcctttactgcagcccagacacccaatgggagcataatgccatcagattttgcgtacgtgttacctccatatccatctttgatatctctgctagcacccactcagccttgggtggcacctcgggtccttttcccatttgcacagccactacttctagctctggagccatcactggatgctcagcatcaggcacagttcaccttttgctaacccctctctcgacccatttccattcatggactctggggcttctttggataatgacagctctaggaccagtgtgtctgccccagacccagctccacatctgaagcactcagctttagaacagggcctagaggggcatgcagcaccttagtttatgttggggaggcttacacatgagcaccggggttcctgcaagcctacagcacctctggtacagttggagagggcagtactactgaaagcaaaaactcctgggaaacactttcctccctgcctacagtcagagcagctggggcctgtcctgccaaagcacacctcttagaacatcactgagaagaaacatgttccagaaggcacctctgttccttcttgtgttcataacacctggaaaccatctggccaaagcacgtctgttgtggttggaggagcccgcacataccagtgcttgggacacttctgtcttgcagacagaccacctggaatgcagctggccagagcacatctgcatccctcaaagggaaggagaaagcagcacatctatgcttggaggcctttatgtttccaccacaagcagagcaccctgttgcacctttccaagcacctatgttgcagtagcaggggacaacacactacctgtgactgcaagtcttctcttcttgtgtctggtcagagcgcttggggcccatatggcctgggcaaacctgttactgctggagaagcctgcacaacagagaagaaacatgtgccccaagatacttctgttcatgacttctgtcaaacgcctttggaccactcagcttgagcacatctgtttctgttggaggggctggtgccatatctgtgactgaagaaactactgtttatgaatacaatcagagcatgtgagggccataagtccagagtataggcagtgcaatgcctgcaatgggaggagatggcaccatacctgtaatgggaggagatggcaccatatatgggtttgtttgggggggacacttctgttcatgaacacagccagaacacctggggtccacaagtcctgaattcaggtgtacaatgggaggaaacagcaccccacctgtgcctgcagaaacttctgtccatgaatagtcagagagcctgaggtccacaagtccagattaaagatggtgcaatggcaggacacagtcccacacctatgcttactcgcgaatacagccagagtgcctgggttccacaagtgaggattcagatggcaagtagagggtacagtaccattcaagtgtttgggtacccttctcaccatcattcagagcaactgggacactggtggctggagcacacttgttgcagtcagatgggagaacatgttgaagaagatacttccattctcaccttcaatcagaacaccaggggcctaagccagggtaccttccctctttcattttggagaaaacaacatcactgagaaaatatctgtgcttcaggaccttttccacctgcttttgatcaggtcaaatgtgcttctgtggtgggcacggcaagcacagcctcgtctttggggcaccctcggcacctgcacagggattctttggggacagaagcatgcagcatcaccctatttgttttcttctcatgtaagacttagggtcctcagtgaccaaaagcaaaagcttcctctagaaatggcaggtgaccactgttccccatgatttgatcttgttctgctgggagcagtttctgctccttctagttacggcaaacaagcttcacctgccctttgtccttctagcacaaactggaagcccaagaccctggggtgtttgtgaatgtgtccaaggacttgggttcagatgagccaagtcagaagtcgacacactagcctaagatgttcacctgtggagagaagagagagatgggtgagtatcagccgtgcaacactacactctagtttcagtgttatcctggaagacctaagctttgggggggtttcctcctgtcttggaactgtcaggacacccactgctatctatgtctgccatgtttcctctgctcatgtgtttttgctctaactcaatgatggagaaaatactgacttgtataagccatgattgttgagccaggcttaactgtgcaaagtttctgtggcccagggcccaggatctagaacatggagtttaaatgtcttttttgcttgtttaatttagttgtatgccagtaattcacacacattcacaattttttttttggctgcagggggttgtgggggagagatggggatctcatcatgttgcccagcctggtctcaaacttggctcaagtggtcctcccgccttggcctcccaaagagttgggataacaggtgtgagccaccacgtccagcaacattcacactttcacctatggatgattggcttggcaatcaggcttttgggcctggaggaaaaaaggaagaaagaactcacgcatgactgctccgtaatttaaaaaaaatttaagtctgttaggatgtaatagattacatagatattggtatcatgttgctttgacacattacaaatgattatcttttaaggtaaatagcaggataggttctatttggaaaaataactggtctatctcgagtcctaaccacaaaaatatcgtcacaagatttataatttcacacagacttggctgaccttggagttgtactgtgctgaaaatacaatctttttaaagtattttacaacccatgaaggtatcttaagatggtggaaagaaaaataaagtacaagcatttccttcagctgcttacagattacagttgtcccttgaacaatgcgtgggggtaaggggtgctgcttcccccacgcagtccaaaatgtctgcatgacttgtgacttccccaaaacttaaccactagtagcctactgttgactggaggcctcactgataacatgaacagttaacacattctgtatgttatatgtattatatacagcatacttacaataagctagagaaaagaaaatggatgagtggatcatcataaaggtttcatccttgtcattttcatgttgagtaggctgaggaggaggaggaggatgaaaaggaggggttggtcttgctgtctcaggagaggccgcagtggaagaaaatccacatgtaagtggatctgtgcagttcagacctgtgttgttcaagagtcaatgtattatattaaacagtgctaggtcttggtgatatagaattcaaagatttatctcttgcagcccagcaatttacagtatagcagagagagacagatagataaaccaaatattacacctggaaagatagtggtggcgatacgggagtaggtaagaaggacataaaactaggtgtgagagagatggaaaaaataaaaaataataaaaaaaagaagaaggaagaagtgtccaggcagagaaaggctatttgggggtcaaagaaatagcatgctaaaagtcagggaagactaatctgtgtaacaaacctgcacatgtatcctggaactttaaattcaattaaattaaattaaaagtcaaggaagaaagagatcatgaccctgtgggacaccaggcaagtaatcaaatgtggttggagagtgaaacccaagctgggagatgtggctgctgtgttcagcaagtgcagatcatggacaaacagacataccatcagggggcatttgtccattatccacaaagtatgaggaatcgtgaaaggataagcaaagaagttacatgatatatgtagattttagaaacactctatgcctccctgaaaggaagaattaaatagatgccagaatagaagcagataggcttaggaaatttttttgcagtgatccaatgcaaaaatgagccactgagctcccagtctagaggaactgacagtgggatggttgaagaggtaagggaagaggcaaggggaagtaggcgatgccaacaagaccagggctattttagccatctggtttagataaacggacatgagttgttttggaaaacatacattaagttaactttctaatagtctgacatggctatggaagacgtaggtgatattcataaagccattcatttacccatttagtcatcagttgggcatatatattattatttgagacaaaatgagtagtctaaggaatactttaggtaatagcatcaattttttaaaaacaaggataaaaatcttatgaaacctaattctagttggagaaaataaaataaacaacaaatgtaataaattagtaaattatttgataggttccagtaacaactgcagggagacgaagggcagccaacgtaggattgagtttagggctagagagaagtgtgagtttctatttaaatagactggaaatggtaaacctcattgggaaggtggaatctgagcaaagtctagaaggcaacaattaagcaaaccacacagttatctgagggaaaggcattccaattagttggactagccactgtaaaggctcagaggaaggatgtctcttgcccgcagggagcagtgagcaactcaataggggaccaggatgaagttggcactttgcagagtgggaagaagggggaatagagatggagagggatgaagagactaagtggggccttggaggatgtgataagaacattgccttttactcacagatggaaatcatggagggtttggagcaaaggatgacgtgatctgactgaggcttaataggatcattctggtttctggggatgagagaccatttaggtggctatggtcataatcatgaaagcttggacacagtggtggtggtgcaggtgatgagaagtaaaatttgtagatattttgaagcattttctgttggcctgaatggcaggagtatgtgtggaaaaggaagaaggaatccatagacttgctatttgagtttagaaaaggttttggcctcatcaaggtatactcggtcactgggcgtgtgaaaaaagatggccgagggagaattcctagaaggggaaaatagggagggaggacatgggaggataacagactcctaaatacatgtggttgagttcattggttgtgcatatggaaattacccctacctcaaaccatcacacaaatgatgaatttaagatatcagataacaaaaaacatgaaaaaaactaaatccaggtacatcataatcaaactgcttagtctctaggagaaaatcaaaagacatcccaagaaaaagcacacattatgtgttccagtagaacacatgcattgttctaatgagaaacaaagaaaaagtaagatgtagctacagacgaatgaacaaaacttgaatatattattttcaaaagttcccccgaaacagaatatggcacacctctcattggaaatacacaagctagaactcaatgagttagcattttttaaaactcgaaagaaaaaaatactgtgaacctataccctgtgaacctgccagaatgtggagacacaggtgctaaaactacacccagtgaaactcttttaaaagtgaaggtacacacacacacacacacaactcaacctttttatacacgtaaatgcttatcgctagcatacctttcattaaaaaaaaaaaactaaaggaagtccgggcaagataaaaatagtgcaagttagaaatctggatctacacaagcgaatgagtagcaatggaaaaagtaaatataaaaatatatgcatatacatacatatgtgtttgtatgggggtgtttgtgtgtgcatgtcaaacactttctgtaaaagtaaaatgtatggcacaatggcacaaatgataagagagaaatggaagtgtactgttcttattgtatagttcttatactatatgtgaaacaatataatattacttggaggtagactatatatgttactctatatagtttatactatagtatgtagtatatcctatataatataaagaatcactttaaaaacacttaagaattatatttagtaggtaaacaaaagagataaaatggaatcatgaaaataatccaaaagaaggtatacaaagaggaaaaagaaacaaagaccagatggaacaaacaggaagcaacagcaaaattgtcagtgtaaacacaacgacatctaaccatattaaatttaattgtctaaatgtatgattttaaaggcagagattgttagattggattaaaaatacaaaactatatgctatgtataaaaaaaacacttgaggctgggagcagtggctcatgcctgtaatcccagcactttgggaggccgaggcgggcggatcatgaggccaggagatagagaccatcctggctaacacggtgaaaccccgtctctactaaaaatacaaaaagttagctgggcatggtggtgggtgactgtagtcccagctacttgggaggctgaggcagcagaatggcgtgaacctgggaggcggagcttgcatgagccgagatcgcaccactgctctccaacctgggcgacagagcaagactccgtctcaaaacaaaagcaaaaacaaaacaaaacaaaacaaaacaaacaaacaaaaaagacttgaaacacaaaaacgaatataactgaaaggataaggatggaataacaccaatgtaaagaaatctggaatagttatatcaaatggagtagatttcagacaaagaatgtgataaggaataaaaagagttatttgataatgataaaaggattaattcaacaataggtcataacaatgctaaatgtttttgcacccagtactagagcttcacattatatgaaacaaggctgataaaactcaaaagagaagtagcatatgagtcaaagaaatctcaagaaaaatttaaaaaatattttgaatgaaattaaagtgaaaactcaacttagcaaaatttgtggcacacagagcatatagttcttagaaggaaatttatagaaatggatgcatatattagaacagaagaaatctaaaatcaatctcaacccttaccttaggaaactacaaaaagaagagcaatttaggtccaaagtaagtgaaatgaaaaataattagagcagaaatcagtgaaatcgaaaacaggaaaacgatagaaaaaaatcaataaaaccaaaattgactctgaaaatatcaataaaactgataaatgtctaaataaaataaccaagaaaaggtagagaagacacaaaaaggagtatcactattgagtcacagatattaaaagcataacaaaaatattagaatgccacaaatttgataacgtagattaaatggccaattccttgaaagacacagtctgccaaaaggatagagaatagaaataagcctgtatctatcaaagtaattgaatcaacaatcaataaccttccaaaacagaaagcactaggccctggtgcttttactggtgaattctaaatatttgagaaagaaattaagttctttacaagcagctctagaaaaccgaggcagaggaaaaacttcctaactcattctatgagaacagcattatcctagtaccaaaatcagacaaatccattgcagaaaggaaaactacagatcaatatctttcatgaatataaatggaaaaagcctcaataaaatattaacaaatcaaaacaaaaaatgtataaaaagaattatacattatgaccaagtggaatttattccaggtatgcaagtctgattcaacatttgaaaatcaattaatgcaatctatcatatcaacaggctaaagaaaaaaagtatataatcatatcaatagatgcagaaaaagcattggagaaaaatccaacacctatttgtgataaaaagctttcagcaaactaagaattaagagtagaatattctcaacttgataaaacatctaccaaaaaaacctacattatatttaacggtgataaactaggtgcttttcttctaatactgggaacaaggcaaggacttctactcaacatggtaatgaagcaagataagcaaaggacggaaaatatatacagactgggaaggagaaataaaactgtcatttttggcagatacataattgtctatatagaaaacccctaagaatcaataacaacaacaaatgacctctaacaactaataagtgattatagtaaggttgcaggatacaagattaatacacaaaagacaagtgttttcttatgtagtagaaatgaataattggaatttcaagttaaaaacacataatacctataataccatttacattagctcctccaaatatgaaatatgtaggtataaatctaacaaaatatgcacaagatttatatgaggagaattgtaaaactctgatgaaagagataaaaaatctaatcaaacggaaagatattccatgttcatttttagaaagactcaatattgttgagatgtgatttattctcaaatttactgtatttcaacaaaatcccaatagaaataccagcaagttactttgtggatattaacaaactgattctaaagttcatatggagagtccaaaggaccagaatatccagcgcagtattaaagaacaaagcatattgacactacccaacttcaagacttactataaggctacagtagtcaagacagtgtggtattgaagaaaaagcagataaattcattaatggaacagaataaagagcccagaaatagaccatacaaatatagttaactgatatttgaccaaggagcacaggcaattcaatggagaaatgatagctttttcaacaaatggtgctggaacaactggacttacacatgtaaaaagtttaacttggacactgaccttacaactttcacaaaaattaactcaaaatctaccataaacccagatgtaaaaattataaaacttttagaagataacaggagaaaaatctaagcgatctagggtttggcaataactttttagatacaacacaaaaagcttgatccatgaaagaaaaaaaaagataaattggacctcattaatattaaaaactactgctcggtaaagactattaagagaatgaaaaaatgagccactgactaggagaaaattatttgtaaaacacatctctgataaaggactggtaattgaaatataaaaagacctcttaaaattcaatagtaagaaaacgaacaatcaattaaaaagtggccaaaatctgaacagacacctcaacaacaaaaatatacagatgacaaataagatatgaaaatatgcttaacatcctgtgcttaggtaagagcaaattaaaataatgagacaccactacttacgtattagaatggctaaaatccaaaacactgacaacaccaaatgctggtaaggatgtagagaaatggtatatccacttggaagacactttggtggtttcttacaaaactaatcatactcttaccatatgattcagctattgtgctcctaagtatttacccaaatgagttgatatctatgtccacataaaaacttgtacaaaatggctgggtgcagtggctcatgcctgtgatggcttgagcctagacgctcgagaacggcctaccgcaacatagccagacctttacctctacaaaaattaaaaaattggctgggcatggtggcatgtgcctgtagtcccagctacttggcaggctgaggcagaaggatcgcttgagcccaggagttcaagggtgcagggagctgtgattgtgctactgcactccagcctgggtgacagagcaagacctggtcttaagaaaaaaatggcaacacggtttctctacggcccccaccggccaccaggaccagaagcagctgcgaagccagccttccccagtttctccctgacagcgctgggttcgcccttccccaccacgaagagtgtccataaggagagctccaccttctctgactgaggccggaggtgcacacaaaggcgcagatcctggagctgctggtgctggagcagttcctggccatcctcccagaaaagctgcagccctgggtgcagaggcatcatccagaaaatggagaggaagctctgactatgctggaggatgtgcagagagcgcttgatggaccaaagcagatcttcttttttggacgaaggagggacacggttgcagagaagctagcaccttcagaaatcactgagcaattgccaactagccagcgcacgcccgtgaagaagcagctccagcgagaatcatgggagctgcagtccttaagaccacatgatgaagacatcaaaactataaatgtgaaatccgcttcaaggcaaaagacttcttcaggcatagaactgcattgcgatgtttcgaacatcctcggtataaatgcctcccagagttccacatatagaggaatgtatgaacaagatgattcaaaatatgaacataggattgcagagtcccaaaagaatatgtacttcaagactaggctgaagtgtcccaggtcactgtcaggaggcagataaataaagggccttaatctcttatgaaagctcacaagaccctccatactattgatgatatcaagttaatttcctgtgttggaaaaaaataatctcctttgcaatgtaatttggaaataactcaatggaaacattaaaatgactgcatgtctacaagcagtcacctaaacataaggaatgttttcataatgagcaatatcattctatgggtgcttctgtaaggtggatgatcaccttaacataaaggaaaaagggagatgaacaaaattgtcaaacaagactgatgtaccacaagtgttggcaagtgcagtgtgtgatggagaaatgtaccacagcttaactggaagagcaagcccttaactgctgatcacaatgcctcagtgtccccttctccagcataaatcagcatgaatatgtttcaagcatcacaagacaaccttttcagagtctcctgcattcttagtaagatgagtttctagacatgctctcatgaaatgataccctggattttgatgttcttgtacatacgaacaaatcactgaagttcaatttaaagggtccactgcagtcctttataaacaattgttgaacctaacctttatagttaataagttttaagacaacatttttgggatatcttatttggcttatctatgagatatgagcacctataagttttacctgtatttaattcagtcagatttcctgtttaaaaataaaattactgacttgtacattattaaagttattttgacagtataaacacagcataattatctcttttccagagattcttgataaaattctgtaatgttattacaagaatacatgtattgtgttttccatggtgctacagttaaccaatatggaggcaaacatcagaaatcaaagcccttggaaaaagggaagaggatcttagtcaacttctttggttgggttcctcatagagtgtaaaacatttcattctcagaaaatccaaccatatcttagagtagctccagaaattggcttagaggagctccggaaatgtggagtgaccacactctgcttagttagtatgctaatacatgtaagatcagtaggaggagaaatgaatgtgaattttattatagaattttctgagagtgattatgctttatagctccagtgaatatgaatatgtattgagttgtattttcagtcattaaaaatgtaggatactttttatttgggcctcattctctttgtaattaaagagaggaacaagcccatctattgtaacaacaaatgcctcagagatatgtgtattgtgaattactgcttaattatggaaaaagtttcttaggttctatgccatcaactttgtaagattgcattctctttcttgtgaataatttgaatgcctccaccaggaagtggtgcgaatcatatcatctaagtatatgatgaatctttaaggggtgttgctgtgtaatttgaattattttgcagttatgtagctatcctaatgagtgaatggtactagtttacatataaggagaactacttgagctaaccttgattttaaaaaattagcattagcacccccattatattaattttcagagatagtaaatactccaaaatgaaacaaacaaaaataacaacaacaacaaacaccttgcacatgaatgtttgtagcggttttaatcataattgccccaaattagaagcaaccaaaatgtccttcaaaaagtgaatagataaaccaactgtggtatatctatgcaatggaatattattcagcaatatgaagaaatgagctgttgaaccatgaaaagagatggaagaacattaaattcatgctgcaaagtgaaagaagcctgtctgaataggttaaatactgtatgattccaactatacgacatttggaaaggcaaaactagagacagtaaaaagatcagtggttgctaggagtttgggggaggaagggattacatggagcacaggagatttttggggtagtgaaactattctgtatgatgctacagtatgggtacatgacattatgcaattgtcaaaaaccacagaactgtatgacaggtagagttaaccataatgtgtactatagactttagttaatatattaatattggatcattaattgtaacaaatgtaccacatgaatccaagttgttagtaacaggataaactgtgtacgtacgggtggagaagatacacgagaacacactgcactttctcctcaatttttctgtgaaactaatactgttctaaaataaagtttgttaatttaataaaaagtaagattacagaagttgtaacttgactttattggtatttgtaaaacatataacccaacaccagctgaacacatgtttcttttcaagagcacatggaatgttcattaagattgggccaaaaaataaatcttaataattttgagattaatatgttttctctgatcacaatagaatttttgtagatctatctacaaaattgtagatatctacaatatgatatctacaaaatcctaaaatttacagattaaatattaaataaataaatactataataaatattaaatttaaatagttaaatatttaaaatactcatattcatatttagaatgaaagcaagacacacttttatataatcaatatattaaaaaataacaaggaaaaatataaaatattttggactgaataagcaaaacacagcaaatcaaaatttgtgatagacagctaaagtgtggcagctttaagcgtttatgtttaaaacagaaacattttaagaaacaatgatttaggtttctaccctgagtagaagaatcaaggaataaattaaatataaaatgaatggaaaagaagaaataataaaaatagacacggaaatagaaatgatagagacacattaattctattaatttctatttatagacatttctatatataatatagaaattataaagtgtaataaaatggagaaacctctatcaagattgaagaagaaataacaaagagaaaactcaaattaccaatattaggaataaaaagggaagggcatgagtcagatctgaaagacattaaaagggtaatggggaattataaacatcctctaagaaaaaatatgcagttccagacggtttttcaggtgaattctatcaaatgtgtaagaacaatattttacctgtgttacacaaactctttcagaaagtggagaaaggggcaacttttcgtaactcattctataaggccagtattactctaatatcaaaacctaacaagaagagaaaattacagattaatatcgctcataacatagacacaaaagtctttggcaacactttaggaaaaccaaatataaaaagatgatcttttgtgactaagtaagtttttccccaggaaggcaaagattcatttaacacctaaaaatcaatcaatgtaattcatcatattaagagaataaaagagaaatgtcctatggtgatctcaatagctgtgggtctcacaccacttaccaaaaacattctaagtaaagcaggaattcgagagaattcatttctgtgataaagcatatctacaaaaaatcttcagttaataccatactgaatactcttaacctatgattaggaactgggaaagaatatccattgtctcttcttgtatttgatagtttcctggatgttgcagcaaatgtagaagataagaaaaattaataaaaggcatagagattaaaagagaagaaagaaaagtgcctttaagcacagaaaacgtttgtctatgtagaacatctgaaagagggctgggcacagtggttcacacttgtaatcacagcactttggcaggccgaggtgggcagatcacctgaggtcaggagttcaagaccagcctggccaatatggtgaaacctggtctctactaaaaaaacaaaaattagctgggcatggtggcacatgcctataatcccagctactcaggaggctgaggcaagagaatcgcttgaacccaggaggcagaggatgcagggagctgagattgcaccactgtactccagcctaggggggatacagcaagactaaaaaaaaaaaaacactaaagaatctacaaagaaactacaaaatgtaaatagaaaatgagcaaggtttcaatacaaaagtaaatatatcaaaagcagttgttttgtccatatactactatatgccaatatatgtatatagtacgtgagtacacacacacacacacacacacacacacacacacacacacacacaccccatcatcatcatcattttcaggggctagggaagttgatattggtcaattatcaatctcacccagggccctgacagctggcctatggaattattgcaagtgatattggtgcccttggggcataaagcttttaagctagcatggatcttgtatctacctgatgtacatcttatgtcctcgttcctgggagaagacagctcacagacagctgagtttttggctgcacatcctacttagaagagaaatgcctgattgtgccatgctgacaagtgttggtcctggcaaatacagaaggaaataaagagaaataaaaagcatgtagattacaacagaaggaaaactagctttattcacagaaacatgattcctagaaacattattgtgtatgtagaaaatcctatggaatctgcaaagaaactacctgaaatcaaaagcgatttcagtgaggttcaatatacaaactcaatatgtatgcatatatacatttatgtacatacacagtcatgcacctcataacaaggttttggtcaacaatgaactgcatatacgacagtgttcccataagataatatgacattgttactgtttcttttctgtgtttagatatatttagatacacaaagacttaacgttgtgttacaattgcctcaaattcagtatatgccgtacaggtttgtagctacaggctataccatatggcctaggagtatagtcaattataccatctaggtttgtgtaggtacagtctatgatgtttgcacaatgacgaaaatcacctaatgatgcatttctcagaaggtattcccattgttaaagcgacactggactgtattatatgtattacctatattctaccaatgaactatcaaaaattaaaatttaaaagattccatttacaatagcatttacaaaccccatagaatacttagaaataaattagcaaaagctgtggaagatctatgcacagacaactgcaaaacagttgcaaattttctcttaaaaagccagatagtatgaggttggtacaaaagtaattgcggtttgaaagtaatggcaaaaaccacaattacttttgcaccagcctaataagtagcatagcctttgtgggtcacgttgtctgtgacacagactctttgtgtttctgtgtattctgctgcaactctttaaaattgttaataggatccttcactcactggccttacatgtaggctacaggctaaatttgttggcccataggctgcagtgctgacccttgctgcgaaatatttctaggagaaaatactcaagacctaaatctatggagatatatatcatccctgtggcctggaaaagttaatattggcaagttgtccatcttggccaggaccctgaaagatagtctatgttattgtaagaaagattggtgtccttgggggcatgggcttttaagccagggtggaatctgcagaagtctgaggtgccatttcctgtccctatacctgggagaaaatagctctcagacagctgtgtggctttctgcaaagctcaattagaagagaaattatcaggcgtggtggcgcatgcctgcagtctcagctacttgggaagctgaggtgggaggatctcttgagcccaggagttcgaggttgcagtgagctgtgactccagcctgtgtgacagagtgatacgctgtctggagaaattcatcatggagatatgctgataattggtggtccctgcctacatcctcccaggagactgagccagacccggtgtggccaatggtccacttataaattgaaccatgttagacctcctaacagtgcaagtactcattacagctctgacatggtgctaagcaccccaagtattataaacaagtgtaatccattatgcacacacggtgaggctacaccaaagtctggtggttaaatgcatgatctgtggaatcagacagcatgggttcaaaccctggctggggtgagatggggaactttctaaggcttaaatgctgttttaccaaatattttaaaagaagtgaaaatacactgcctgttagaaagggaagttttggggtgaagcatgtgggcagtttagaatacctggtgtccacctcagaaaccatcacagcccagatgttataggttcaggcctttccagggcgggcacatagaatgtcctcgcctccaaggtttggagagctgcgctataaaggttcttgcaggcggtgtcctgagcccagagctgcctgcaggcgggcaggagttgtgggggtgttggcatgatctggtgtcctctgtggcggctgcctgaaaagaagaggccgagggttctttgtcctatgtctctccgaatcttaatacctgccctgcagcagactccctggctgccagggcacaccggtcaccccggtagacggtgccgccccgccctcgccaaccccttatcccaactcccatttccagccttccaggaagcccgatccccacccccgcaccatgtgagctgctcctctactccgcgtaggggaggctctgcctccggtgaccccgagggaaagagctagagcacccacaggtgctgactgctgcggcgctgaggacgctgcacacccgttcaccggctgacccagtgctgctgacaaccagcgtccgcggcccccaaccgtcgaacagagcgcgtgggaccatctggtgccaaacgcctgcaacggagtgcagaaggtcacgaggcgctagagaccggttgggggcaggcggttgggccttgacgctctttgctgggcgtcgttttttcttctcgcccccttcgctcctgtgcgcttagtgcacaagccctgggctcacacaccctttctctgtcacgtgttccaacagcatctcacctgcatcgggctgaacaggagacctcaattttctcctctactccaaggattcgccggctcacaattgctcttcatatcttcagcaagctttgtctgtgccctgcccctctgtcccccattgcctaccatacccgctcccaccaagcctgcatcacctcgctgtctctgtgcctctccccggcccccttccaggcctttctcccacaatttctggtctttgctcctgggtgttccgtcgaccctaagaggcggtgtctgatctggcaggctcaatgcctttctctggcgctgtctgcacctccaatatattcagtgactcaggaaggatccatcctgcagggcccagatagactctcctgtttgccacctgagcagaaaggcacctctgtgaggtctttgccacccagtcaccctaccagacccaatcagcacgtgggagacgtggatgacaggaggacagagatggagagggaccaaaagactacatggggccttgaaggatgtcataagaacgttgccttttactgagagatgggaaccatggagggtttcaaactgctgagactggcatgatatgacttagggcttttttgtttgtttgtttgtttgttttttcttttttgtgacggagtctcagagtcttcctctgtcatccaggctggagtgcagtggtgtgatcttggttcactagaacctctgtctcccgggttcaagacattctcctgcctcagcctcccgagtagctgggattacaggcacccaccaccacgcccggctaatttttgtctttttagatgttttatctcagagaaagagcttccatgttctctaactcttgtaaacaggtattcttcaagaaactttacaatataacattcatacacagaagtgtacaaatcatctgtctattcctcaatacatttttgcagaatgaacaaacctatgtaatctagatcaagaagcaaaacacaggcacctcagaatcaacctcatgctcattcctagtcactatgcccctcccaaatttttaacattatagattagttttgcctatttaaaaactttatataaatggaaccctaccatgtgtcctgtttgtggctgtgtcttttcattcaacacttcataaaattcatccatgttgttgcttttagcagcactttattcttttatattgctgtgtgatgttccattgaacaaatataatttacccattctattattgatggatgtttggctattagaaataataatgctactgtggctaggtgtagtggctcatgcctgtaatcctagcagtttgggagactgaggagggaggattgcttgagaccaagagttcaagaccaacctggccaacatagtgagacccccatctctctttaaaaaaaaaaaagaaagaaataatgctgctgtgaacattcatgtgtatgttttcgactacttctgaggtaggacgcaggactcgactccagagccggggcttggacactggagcaaattgaggactagctaaaacagggtcagggtggaagcagctttccatcagacacacccaccagtgtgctatgtcagtttacatttgtcatggcaacatgcaggaattactgctcctttccatggcaatgacccaatgacccagaagttactacccttttcctagaaatttcagcataaaccaccccttaatctgcatgcaattaaaagtagatgtaaatatgactgcagaactgccctgagctgctgctctctgcgccctgccgatagagtaaccgtgctctgcaggagcagtcacagagctgtaacactgcctcttcaatagagctgtcttcttccaccaccagctcacccttgaatcctttgctgggtgaagcaaagaaccctcccaagctaagccccaatttgggcttgcctgcccagcatcacttccaatatcatggaaattttcagtgatgcctactatgaggtttattgcttaacttttcacatttagctctggaattctcctgtcgatttgcatgtcttttgtagatttatttcatgtttattgatgctactataaatcctctgaagggatttacctttggatgtagaaggcagctaggatgggaaagcacactttattctgagattaatgtaagtcagagccatgcttcactctttttgaaggctggctctctcctgttatccttatttctgggatactggctttcagacgttttacatgaaaacctgagtattttttggggaccctcttcattggcaggtcctgactctgaatttttttctcagcagccgctgaaattgctgaattttacctccaaaacttgatttgaaaaaaacgaagcaaaggtagaaagaatatcattctaaaatcattgttttataaacagattttgctacgtagatgcaattggccataataatggcagagaaggccagattttctttctaactgttataacagtttttaaacatgaaaaaggttcatttagaaaacaatgttaaggtaggggcacggcagagaatgggaagatggtcagccgggaggagcagtgcaagaagagagcaaagacacaagcactcttgtgtgcagaaaaggcatggtgaacataggggtaaaaatcactagcccttctcggagcaattccaacattatctgaaggaaagtccatggaccatgagaaccccccaccttctgagacacatatatctggactgtgggactttgacccatgttggatcagccagatcccctctccctggagcagtttgtcggcacaggaagagaacagctcagcccttggagagagagtcacttatgggtaggatgccctggcttcctatggctggcaagtgtgaaagttgattatataaattgagccattcttgttatacccaactaaaacagaattggaaggccaggaggagaaaacacactcagggcacgccaagaatgtaattctttgcaagcctagctgctgaaattgcctgctgtaacccaaaaacggttttatgtagtagcttctgaaacaacctgccggactctatgattacttttacccactgctatcacttaccaatcagaacttgccagctccccaaaactttactagtgccaatgagttgtctttgcaaaataaattgtctttgctcttttaacgaaacctctttctatttgttcttctaaaaggctgcccagttgtgtgccctgaattgcaattttcacttcccaaataaaacagtttatatttatagagatttatctctgtattttgatttcgacccaacgccctgatttgctcactgctgtgatccagttgtacctccaggttcagtcaatcctctccaattcttcaaggattgtcccaagataggttagttttggctgtcctagcttttcatataaatagggacatgcagtatgcattcctgtgcaaggattcttttcacttagcagaatgctgtgcttttgtacttttgttgtctgtcatcaggggttattttctttgatagctgagtaatatgaatacttcataatttctttttctattctcatgtggattggtatcagggatatttccatattatgcttattatgaataaggcttttatgaattttgcctactatgcaaggctttttgtgtcatgcaagcctttttgtgtacatatgttttcatttctctcaaggaaataattcagaatggaagcactgagtaagaataagtatatatttagttttatagtaagttttatgacattctttcaatgtgattgtaccatttcatattatcattgcaatgagaaatcttccatgttttcatttctctcaaggaaataattcagaatggaagtgctgagtaagaatgtgtatgtttacttttataataagttttatgacattttctcaatgtgattgtaccattttatattattactgcaagtgagaagtgttccaagcgctttacatccctacaggcattctggtggatgtgcaatggcatctcagtgtggttttcatttaaacttccctgatgattaataatattgagcatttttggtgggcctgttgaacatttctgaatcaacttttggaaagggattattgctcaaatgttttgtccagtttttttaattgggtggtttgccttattgttattctatcattattattgttaggttttgaagggaaggggagagagagagagttggtggctctacagcaacacaggtttattgccagtacaacttgcagagaggggaccagcttggtgccagagctcactgctgcttacaggctggggtaattacaggtctgggcaggaggggtctgggcccgtatggcttgctgcccaggaggatgttgataaagatgttccttgggcctttgcccagcaggatgtgataaggaagtcaggtggctgggcaggatgtttctcacagcccagggccccatggaatctttcattctgaccagggtctgtgaaatggcagggacttgcaaaatggtgcagcttggactaacaattattattaatcctaaagggagaaggagattcagcaagaatggtgaaaggagaattataagtagggcttctcgtttcatgatcaatatctgatgggggggggtaagtacaggggcagtcaggattggagggtctggcaaacaggtcagctgaatcagtgtctactaatgaggcaggagccaggatccacatgatgaaagtggccacagtcaggaagtctgaaattttctcagcagaaagggagaaagaacaggcaggctgagtggccctgctgtctgaaggggcctcagttttatcctccaacgccttggggctccactggtgctcacctctcttctccaagcctaggtcttcagcagtgactatacaggaaacctagggggcagaggtagctctcctccacccaacaatagcggcagtggcagcagcaggagtactggaatttggagttacagagctcacagctgttagatgtgtttggaaagttccttcttgagagtgtctggaagctttttctccctgtgtcttgtctgactttagtgaggctggagatctgggtgaatggcctccatcaacatcttccttcgcccacctctccagtagcagagtgcagataagactggacgggacagccctgctgaacccacggcagacctccaaagaggtctgtataagctggcgatgtcactgactttggcaaatgggctcagagaagatgctttcttactcaaggtgtcttctgggtgtttggaacagaggcttcctttcaggagtccaggactgtactggaaggaagtgaccacaagatgacaccgttgatcttccagacactcccgctgttatgagggtgaggggggagcccttctctaattatccttcttttgctactttttccctctgccttagcttttcctttcctgcactctcctggggacttcaactcagtctttctgaggcaagtatggaggggaggacagggtggcccagcttcgtagagatcactacctgctcaaaccccaaacagaaaggagtcatttgcagcctggaggaggactctaccattccaagatattcagctgaacaccctagtagtgctagccggcagcagtggctcctgagacctccacaccagagtcccgcacacattcaaggtaagaaccccagagaggagcccagagcctgcggaatcagacaccgcctcctagcggtgatgtccaaccgaaaaggcgcgggactgcagtaaacctgggcgagcaaggtcgaggagagctctgtgccgggaccgcgaggcgatccagaccagatgggggacgaggggcgcgtatgaagcttgtagaagaggttgccggtgaagagcagcctgtgcgctgcacaccctgttacgcaattgagccgccgttggaacgcgtggagagaaagggtgcgcgaggccagggctcgaagaaacgcagcagagggcaaagggcgaggtccaacggcccagccccagcaggggactctcgagcttcgggattccgcctacccggtagcggctgtttagacccagaccggcccctgcgcgatatgagcaccgctcaggactgcagctgttgggcaccagcagccaggtctgcaggctccgcgaagcctggcccggaccgtagcttctgcaagcagtccaggtgtatcctggggtcactggagggcagagcctgctcagagcgagtacagaagcagcccaggtcttcccagcaccaggttcactggaagtgccaggtgtgggagagggagctggggagggaagagggctatgctggttcccgagctgaatgatgtacccaagaggccaggtagctgcagcaggtgctaagatgaggaggagacgccatcatggggtgcaaatatggagcacaaaaggctggaccctcatccttttaggcagctgctgctgaagacatctgtttcccctctcccctcctcaggccaccacctccttcatgctcctctgtgatcacctctccaagtcccggtgtcaggagccttctctgtggccgccctggagagacttgagcctgggacgtgacgtgctgggctgtgaagctttctgagaagggaaacctgtggcctgacctgcctgaatgctgcacccaacctcatctcttcctgggaggcaggctctcttcgcttgtttttacaaatttggtaaaacagcatttcagtcctagtccctggtagtgaccctgccaggatttgacccaggctgtctgactctatttatgcacaaatcacgtattaccattttttattgtccttagtccatggcacacatataatgagcacttacgtggcccactaggaagtctttcctttttgcttcaaactcagatcttggccattggccacaatggggccttggtctcctctgaagatgacctgggactgctgttcacaagcaaatccccattgggcatttctattctcattgagcttgcagcaaaccatgaaggtccctgtggcctatcttctcccaaagccaaggatgggagatggtacatcaggtgggcacaggattcatgctgatttaaaagctttatggcagggcacagtggctcctgcctataatctcaacactgggaggctgaagcaggagaaatgctggagaccaggagtatgcaaccagcctgagcaacacagtgagaccctgtctctacaaaaaaattttaaaataaaattagctgggcatggtggcatacgcctatagtcccagctactcaggaggctgaggtgggaggatcacttgagcccaggagtatgaggttatagtgatctatgatcacacaactgcactacagcctggacaacagagcgagaccctgtcttgtttgttttgttttatttttgagatggagtcttaccctgtcgcacaggctggagtgcagtggtacgatcattgcaacctctgcctcctgggttcaagcaatcgtcctgcctcagcctcccaagtagctgggattacaggcgcccaccagcacgcccggctaatttttgtatttttagtagagacggggtttcaccatgttgtccaggctggtcttgaactcctgacctcaggtgatccacccacctcggcctcccaaaatgctgggattacaggtgtgagccactgcacctgggcctgtctcattttttagaaagacttttcaggatcctggtcaatattgacaatttatcaatattgacttttccagtacaggagcatgatatatgtctccatatatttaggtcttttaagatttaagattttctctcaacaatattttgtagcaaggtcaacaagctaattggcccctgaactatttttgtaaggccagtgactaagtacagtgttaacatttttggccgggtgcagtgcctcatgcctgtaatcccagcactttgggaggccgaggagggtggatcaactgaggtcaggtgttcaagaccagcctggccaacatgatgaaagcccatctctactaaaaatacaaaaaattagctgggtgtggtggcaggcgcctgtaattccagctactcgagaggctgaggcaggagaattgcttgaactgggaggcagaggttatagtgagctgagatcatgccactgcactccagcccgggcaacaagagcgaaactctgtctcaaggaaaaagaaaaaattaagggtctaaaaatataagaacgagactaagtggaaaagaccataagcaacccataacgccatatttactatctgggtttttaagagaaaatttgtaaccactgttttgtagttttctgtgagtctaacttgcagagcttttgctaatttattcctatgtattttatgtgagttgtaaacactactgtaaatggtatcattccaattttagttttcaatcattcatcaatggtatacagaaatttttaaaaatacacattgacttgtatactgagaccttggtaaattcacttttgacttctggtagcttcttcgttttctatgaatcatgtttatgtgaataaagctactttaacttctgttttaatctgcatgcctttttctttctctttcttacctttacatttgcagaaaccaacaactgtcagcattgacaccatcaggcctttctcttctaatttaaccttgcagccaaccacacggctatctgtgcgggatctctccccaagctcaaggacatgagatgcggatcaggtaggtgcaagatccatgctgtcttaaaaagtcttataaggccaatatgtcttggagcaattccatacaccaggggtccccaacacccaggccacagaccagtactggctgtggcctgttaggaactgggtcacacagcaggaggtgagtggcaggtgagcggatattaccgcctaagctccgcctcctgtcagatcagcagcggcattagatgctcttaggagtgcgaaccctattgtgaactgcgcatgcaagggatctaggtttcacattccttatgagaatctaatgtctgagaatagtttcattccaaaaccatccccccgctacccatggaaaaatttttttccacgaaaccagtttctggtgccaaaaaggttggggactgctgccctagaccagctttctggattctggctgaaacggacaacttaccaatattaattcttcactccaccagctgatacacacacacacacacacacacacacacacacacacacacacatttgtacgtgtattagtatacggcagtttacagaaaaataattgttttatatatattgatcttgtatactagcaccttgcaaaattcataccttactttttataattttttatagatggattataggattttctgcatacacaatcaggatttctgtgcattgagtagtttaccctttccttttaaatctgtatgattttaatttttcttatcctccacatttgctgcaacctccaatacaacattgaatccaagagaagtcaatggacttcattttctacttcctgatcttggggggaaaatattcagtatgctgttaactgaagttttttttcgttcaatgcatgcattatcacataaaagaaataaggaaattccgtccacttcctactttactgaaagattttttttgaaaggaatattagcttttttcgattagtttgttcacaactattgagatgaattgtatcggctgattcttttctaatagcttttttgagagacaattcatgtaaaatacaatccatgtatttgaagtatagaattcaatggctattagtctattcacagaaatgtgcaaccatcaacacaattttgtaaagtattcatcaccccaaaaagaatctttgtacaccttagccatcaccttctaatacccccacacctcccagttctaggcaagcattaatcgactttctctctttgagtttacctactctggacatttcctgtatgaaaccatagactatgtggttctttctggctggattcattcatgtattataatagttttatatggcatatacataacacaaaatttaccattttaacaatttctaaatgtacaattcactggcatttagtacatttatattgttgtataaccatcgccactattcatctccagaactttttcatcatcctaaattgaaactctgtacctattaaacaataactccccagcacacattccccacagctctggtaaccactattctgtctctatgaatttgcctattccaggtatatcatataagtagaatgacacctttgtccttctatgtccaggttgttttacctggcatagttttttttcaggttttatccatattgtagcatgtattagaatttccttccttttgaggctgaataatatgccattgtatgttttgtttccccattcctacattgctggatacctgggttgcttccagcttttggctattgtggatgattccactatgaacatggggtactactgggaaatagagtagaatgaacctgacatttattcaacaacacagacacatctcaaaaccattatgcttatcaaatacccacacccaaaactgcatactctgattctgtgtataacaaattttagaaatagcaagattaatatgaaatgtcagaaagcggataaatggttgtttgtggttagatatgcggaggaactaacaacaaaggagcataaggggattttttaggatgatggaaatgatctgtacctgaattgtggtggggccttgagtgtacacatttgttaaaacttagcgaacataaaacaggtgcatttttcatgtaaattttacctccaaaaggtttatccgaaaaaaaacatttgatgcaaaggcagtcacaacgtcatgctaacgtcgttgattgttttataggcaactgctattgcagttgacgatatgaaattgacgataattagggcagagatagactatgtggttctttgtggctgggctcacttacgtagcgtaatggttttatattgtgtataaacaacataaaatttaccattttaacaatttttaaatgcacaattcactggcaataagtacatttatattgatgtacaattattgccactctccatctccaaaacttttgttcataactgctatggtagtttgtaatatattttagacaattcatttagaaaagattaatgctaaggaaggggtatggtggataataggaaggcaagcagtgggggtgctgggcagggggtaaggcaggaagaaagacaaagcagcaagtaagcttagatgcagagaaggcttgctgacatgcggaccttgtccgagcatctgttgcaacataccctgatgagaagttcatgtgcaatgaaactccaactcctgggacctatgtgtggaacactgggaccctgaccccgtcagatcagtcagatcccctttctccagagcagattggtcagcacagggagacaacagctcagatcttcgccctgtgagatcacttatgggaggggctgccccgaccccccacatctgactcccccatgctatagtttggtttgtttgacccctccaaatctcatgttgcaatgtgatccccagcgttagaggtggagcctgatggtaagtgtttgggtcatggggttggagcccccatgatgtcttggagctttcctcacagtgatgagtgagttctcactctattaagccctgcaagagctgattgttaaaaacagcctggcaccttcctcccctcctctctcgcttcttctcttgcctagtgatctttgcacatgccagctcctctttgccagcctaaggccctcaccagaagcagatcctggcatcatccttcttatacagcctgcaggactgtgagccaaagaaacctcttttctttataaattacccagcctcaggtattctttttatagcaacacaaaaatgaatgaaggcatccctctcttcaatgctgcaggaattgttttcattacaggtttgggctgctctataatttcatataaatgggagcatacattatgcactgttcttaagccttaaggagtctttcattcagcatcatgtttctgtgatccatccatgttgcctgttatcaggaattcattcactttgatatctgagtatgaatgcaccatggtttgtttttgctttctatataaatagacatctgaggtacttccaggttttacatattatgaataaggctgctgtgaacttttctggtgcaagtgattctgtgtccatgtgtttttatttctcttgggttaatacttaggaatgaaattgctcagtcagactagatatatgtgtagttttctgagaaaccatatgaacttttttccaaagtggttttacaattttatattctctccagaaatgaagaagagttccaggtactccatatgcctgccaacatttggatacctgggttggataccttttaaactttatccatttcggtggctgtgtagtggtgtattgttgttttaaattttcatttctctaatgacaaatgatgttgaatacttttacgtgtgcttgttttatgatacttctttataggagaattgttcaaatattttgcccatttattatgtggctgggcattttatagttgacctgtaggagttctttatagatcttgcacacttgtcctttgctagatatatgttttgccaataatttccccagtttatagcttatggcttgcctatttattttctgaattaaatacttttggggcaaaagttaatctcgtttatggtttccagataataaattttcttttgatgcaatctcatttctcagtatcttattttataatctttctattcttaaaaactcctttgtagcccaagggattaatcagggtctcttacattttgttctaagacgtttataattttttgaaaaccttgttttttgaatccatctggaatttgttttcataactgtctgaggtgaagacgtcagcatttctcccatacacacagccaatggtcttcgaactcaaccgcatgtttgaggaggagaaagaggaggaggagtccatccatcattcctctgttttctcccttcttattttttttgagacagggtcttgctatcacccaagctggagtgcagtggcacaatcatggctcactacaacttccacctcctgggctcaattgatcctcctgcctcagcctcctgagtagctggaactataggtgcatgccaccacgcccggctaatttttgtatttttttgtagagatggagttttgccatgtttcccagaatggtcttaaactcctgggctcaagcaatccaccccccttggcctcccaaaatgctgggattacaggcatgagccaccgcgcccaaacttcccttcttatttttggatgccatctgtgtgatttgtttccatagtccctgtgatcaagtattcattaatgagaaaaaatttccccctcccagaacagcaaattcctggaccctttctctcacacacactcccatcattcaattccacaacaatactttgatacatgtacacaatccaaagtgaatgtgcacaatccacttctcatgccccccactgctgttgtgtgtccaagccatcattaccctccaccttaggggctcagcctcctgactggtctctcagcctccgtgctcatccgagcaaccaaaatcatccgcttaaaatctacggcagatcatgctgtcctatgctttaagccctccagtcattcccatctctgaggatgtcatcactttataatgacaacctacaaggccctccctattttgtgtgtccccatccctttctgctctcctcgcccccactctctctcgtgctgaccgcagccccatcagcttactgactgccccacgaggatgccaggcatcctcccttcgatcctttgcagtggctacttctgctgtttccagtgttcttccctcacgtgtctgtgtgggtcacttgatgacccccttctagaccttgctcaaaactcaccttcctagtgaggttgtcctctcttccacgtgcacatggagacttctgcttctccttactccaagtgtcaaacctccacaggcaattttattcttcataacatgtgttaccagctaaactgccacatcatttatgtgtgattacgattgttgtttattttctccccccgccaactcgaatgtaagctctgctgacatttttgctgctacttataataggtcccagctcatcccagatgctcaataaatatggcaaattgacaaataaatgagtcaactgccttctgaatattactgattcatccacagggtttcacactattaaaaaccgaacactattgaaagctgaactcaccctacgaaaacaatgcatgtccatttgtctaaggcaagtggctacagtcaccctggtcatgtgtggcagttaatcgtctcacttccctcttctgctacttcctctccagccactctcagctcctctagaacgggagctcattgtctcgtctttgctttggccaaagaacccccggagcccctttacctctgttctagcacccattggattcttccttccaaggaagtacaagaatgtttctaaaagctacatatcatcatttcacttctttgctttcactcctttcgtgactttgcatactttcaggatgaccgacaagtgcccatcacgtacattaatttgtccgttatctggcccctgctgatcattacagccgtacaccccaggcttgacttcattctccagctgtacctgactaccttccttgtgtcccacaggctcacagcctctctggcttccttgacttttcacataatatttccttgatgtgaaaatagccccactctacctagaggcttcctcctgcttcttgaggtgcaattaaagttccttctctcccgtatttaatactatgtccttcttacctgctctccgatccctagcacaaagtcctatttaaatttttgatatgcatctgtctctcctactagaatgtaagttcttgtaggtcaagaaatgtctttgaaccctatctcaccagtgactagcacagtgtctagtgcaggttcatcactaagtaaatgtttaataaaataatacataagaagctggcagaaattcttgggttttccctctttcctccatctgaaggtggttttcctgggttataaaatgccttagaaattatagagttttcaacaatgaagtctagtttagattcagcctgactctatgatcagccatgggttgggtggagtgtcaacttttgcaacttgagattttagtggtttaaatagggacaaactgtatcttttcccacataggcccaatccaggtacttacttgaaaataatttatttttctttcatttttttcctttttgagagggagtttcgctcttgttgcccagactgtagtgcggtggcgcgatctcggctctctgcaacctctgcctcccgggttcaagcaattctcctgcctcagactcctgagtaggtggaattacagtcacccaccaccacacccagctaattttttgtatttttagtagagatggggtttcaccatgttggccaggctggtctcaaactcctgacctcaggtgatacaccctccttggcctcccaaagtgctgggatcacaggcatgagctactgcgcccggcctcaaaataattttttgcaggactttttaaaggagtatgataacaacttttgagtcatatattttatcctagacttaaaatgtttcagtaattacccagtggcatgagctctttctttcattgttcttgcaggcccaagaggctggatgccaaacctatcctctccatgtgaagcaccaacttgggggtgtcaactaaaaatatgagacccgtaaacttggaaaggaagactttatttcttgagaagggttgcaaactgcaggctgggaagtggcacctccagctgagaccacaaacaggtactttgagggagatagggtgggataggagttttatgccaaacaggttggctaaacagacatattcaacaggtcacagggggaactatgaatattcatgaaagggggtcatatgtgtgcttgataagcaaacatatgtgttacatacatcccatgttcaccttcgagtggagaattaacattaaaatgcagtaaaattaggttctgtatgttaaaaggtgaaacacaggacatgaagacactttgtacacagcctcggtgaaccagccagaaccagcccatggttgaatactttgtagcctagtcagtttgtcacttcaaaactgcaaaaagggctgggagtcaggccgcatcagcaggcagttggttgaagtcagcggaggggtgttccattctttgtttttccagggcttgtttctgtttaatttgggaaacaaacaaaaaaaaaccctggtaacagtgaggaaggggtatacggaggcgcaatttcccatctccttacggccgggaaacttagtttttagttttttgggggtcaccttggccaagaggggtctgttcagtcagtcagagggctcagggttttattatttatttgtttgtttatttttctgagacggagtctcgctctgtcacccaggctggagtgcagtggcacggtcttggctcactgcaacctccacctccagggttcaagcaattctgcctcagcctcacgagcagctgggattataggcacatggcaccatgcccggctaatttttgtatttttgtagagatggggtttcaccatgttggccagactggtcttgaactcctgacctcaggtgatccaccccacctcggcctcccaaagtgctgggattacaagcgtgagccacctcaaccggcctctgggttttatttgtatttcacagtggaatgcctggccccaatctaatttaaaaaaaaaacacatagaaaagatattcaaacatttttaaaagacgaaaacagtaaagtgtgctttcctgtcacacagcagggaggatctgacctttggggaggtcagatggtgtaggggaagcacagagggaggtggcaagggcatgtcctggtctctctttctctggacctctcctcttcctgggctgatatcctcacactctcatcagagacatcagaagtcagcacaaacagtcctagagtgtgctacttccatgtcacattagctgagccacagaaaattttgaaatgtcaagtctggctcaacctgtcaccattcatagaaggcatccttccttctagactggcctaaaagtgaagaccccagagcagagactcatgaacatgaaggaggctttagatatttaatccggaaaagcaagtaaaaggaccatggagacaaataggttaaaagaaaaggaacagcttgcccgcagcggggtgggagttgctggaggtgctaccagtcccaagactagaaggaaagtgtcccagagcttgagtcttccaggcttacagacaaaaccagagtggagcacagttggtacttacaagtctctctttcctccccacagtggactttctcaaactggggtattgacctctgatgaaccgccatgcaaacccgtgcctttcaacataaaaagaagcccttcgaggtgctcaccttcaagcttgctagaggaggaggaagagcaggttgagtttgacataactagaatgggttgagcctttccagcagagtaaggttctttcatggtggacagtggccacccactgccatttctacaagaagattttgcttcttaggcactgagttcctggttctttcactagagaaaaatgagtaggttggcaatccagtacttccatcttctgtgaagacctgggcaggcaacgggggcttgggggcgggggcagggaccaaagacaaggctgccatttgctgtgcccaccacagagggacatttactccacctgaagcacaagtattttctcagtgatgttggctcctacaaagtcaaaaggggtaggctccctggcttacgctccaggagtttggactgaaagggacactaaaagtgtcttcctctaagtttatgatgttgccctcctctggctacaacagtgctctggccataagcatcccaggttctctgaatgatggtgggtatggaaatgttcccaaacacaggtatggcggtgtcccctcccactgtaccaatctatgcccagggctggaaggtccgtggtgctctgaactggattcataaacagtagcatctccaaccacaagtgtggtgtcaggccctccaacagtagcacatgtgctcccgtgggtgcctgatagaaagtgggaacatgtgtttattagccaggtgggccccaaatgctctgacgaggtgcagaaagaggactctttgtcacagttgtgctgtgccctcccattgcaacacatgtgctctgaacaggtggagcccaggtgctttgcatgtaggcggacacaagagggcctctaagcacaagtgtggtgttggaaccctcaaggctaccgatgcattctggccaggtgtgtcccaggtggtctgactatagacagcaacagaattatctccagcaccgttatagagatacccgtccaactgatgtgctctagcgggatgggacccgggtgatccgaacacaaggaggaacagaagtttattctgatatatgctccttcttagcgatgttatctccttcaatagtaacaggtatgctttggctgggtgggcctcagtcactctgtagccaggaaggaaagggctcccaaaacagatttctgctccgtagagctgatcttccctcattgcaacagggatgctataggcaggcaggacctggtgctcaggtctaagcccttcctagaataagttgtggttctgagtgttgtcagcccttctgcagatttcaatgacccctgacaaggagccagggtttgggacagacacaatgactgcaaacctgccaccacccaaaggggcttagatattgatggtgcatggcactgctgcagtggccctttatcttgatcccctttttttttgagacggagtttcgctctgtcgcccaggctggagtgcagtggcgcgatcttggctcactgcaagctccgcctccagggttcatgccattctcctgcctcaggcctccacctctcaggttcaagcgattctcccgcctccgcctctgcctcctgggttcaagcaaacctccgtctcctggatccaagtgattctcctgcctcagcctcccaagtagctgggactacaggtgtgcgcaaccacgcccagctaatttttgtatttttagtagagatggggtttcaccatg[132 bp omitted]cagatggcccatatagcgctcctgctattgaaggagcgcagatgtcgctcagatagcgacaggaagagaagtcagtttccccctgcaggtaggatcagtacttttcctaagtggctgcacttctttgaggtgcaagcatacagtgctgtctttctgagagccctggcatgacaccaaggggaggcccccttctgatgtaaacactgagcttgctgggttgcataaggcctctcaggggtgatataaaccgagggggtaaaggtgaccgtgttgctcccaggaactgttttcagaagatgcacaggtgcagcaggaggattcctgccagaagcaggaacagagagggcagggagaaaaaggaggatggtggcctgggggccaggcggggtgaggcttactgaggaagttgtccgtgaagagcagtttgtgtgctgtctgacactgagagtctagtaagaaatttggagaggtctcctagctgcatgttcctccaaggcaaaccatgctggatgtttgtgacatgtcattggaacacacaccagagaaagtgtgtgctagagcagagagggaagacaaggcaccaaaggacaaaggggaatcccagcaggacttttgagagcttgagacagctcatgctctttgcaggtgcttggcaccaggtgtgcccgatgacatggaaaagcatccaggactgtgtattataggaccccacataactgtcacccccagatcaccaggtctgcaggctcctcagcatctaacctaggggcagcaactagtgcctgtgagtctcctagcccttttctctggggttattggaggtcagaggtcagagcgccctagatcctgccaggaaggggccctggctcacaggaggtcagggtaggagaggtgggggtgtggccagcagggatcaactctgtctcatgccattactggtgcacccaggtggcccagcagggctgcagctgcaagacacgtgctctgatggggaggagagaccaagcagtgtggggcgtgatttgccctgacctcttcctttcaggcaacctctgcagaggacactagtttacccccacaatgtccccttcccatgtggtagctcagggttaccacacactgtttcctccagggatccctctagggcctctcaagtcttggagcaggcatatcttctctgtggccacccaggaaggtgtgggtccatgggcatgagatgtgagtccagctgggctgtgaaggtttctgagatgggtacttggcaccccaattttcccaggtcctgcaccccataccatcccttccaggcaagcagatcttccctcttttaacaaatttttcgaattgcaaacagcatttaggactttgcgccttcctcaggtcacccatgtgggcgtaagggagagtcaggatttgaactcagactgtctgattccagagtttatccattgaccacctgacagtggtgatgcctcatcatgtgtgtcacgtatttacatttttaaatagtccttagggtacttagcaccatgtacacctgtcatgagagtgttcactgcctgcatcagaagatgcagggtggagagcaccaattgtcagcacaaccatattgggcatttctctgctaaatgagtcttgcacaaaccacacagctgtctgtgaactatcttctcccaggtacaggacaggagaccacttaggtgcaagatacactctgtcttaagagccttatgctccaaggacaccaacatctcttgtgacaattccatagacctactttttaggatcctggctgaaattggcaatttactgatatcaaatagtgtactctatcaggatggtaaatagttccttatatttagaactcttttttttttttggacagagtttcactcttgttgcccaggctggagtgcaatagtgcaatctcagctccctatagcctccacctcccgggttcaagtgattatcctgcctcagcctctcgagtagctgggactacaggcatgcaccactatgcccagctaattttgtatttttagtagacactgggtttcaccacgttggtcaggctggtctcgaactcctgacctcaggtgatccacctacctcagcttcccaaaagcgtgagccaccgcgcccggcctttagaatgctttaattttctctcagagactattttgtggttgggaatgacaaattacagttcatgagctgaattctttccagtctgtttctgtaatgccaataaccttagaatggtgataagagttttcaaagtttgtagaaaagaggaaaggaaaaaaggaagaaaaacagaggaaaatatgcaacagagaccatatgcaatcttcagagcctataatatctactatctggtcctttacagaaaaatttgcctcttttgtgattttcagtgtataagtcttgtacagtatttactaatttatccttatgtgttttataagttttttgtatgctatcgtaaatggtatcttttacattttagttttcagtattcaccactggaaaatacagttgatttttatatattcaccttgtatgctagaactttgctaaattcactctttacttttaatagtttctttgtgaattccttaggatattctatgttcacagtcatgttttctatgaacaaagagagttttgcttcttcctttttatcctgtatgccttttatttttatttcttacccttatatttgctacaacctccagtaaaatgttgagaaaaagtagagatgtagacatagtttgccagtccctgatcttaggggaaaagtattcaacacggaattgagtcaaagtttgtggcatatgcacttaatcactcaaaagacatatcctctaattcctagtttgctaaaagatgtaagattgtgttaatttctttgcccattttgttaatttcttttagttcccacatctgagggagaacatgtagtatttatctttctgtgcctgacttatttcgcttaacacaatgttctccaggctcatccatttgccacaaatgacatggttttatttttttaacgactgaatagtattccattgtgtatacataatgcattttctttatccattatctgttggtggacatttagattgattccatatcttagctattgtgataagtgcttcaataaagataggggtgctaaccaagcacacaggcttaattagcttgacaattcttacacaaagtagagatttccgaaagacaccacattcattgagtaaattaggaaaactaaaacctgcctggcaagaatgatgaagaggcatatctgtggaggctttggatcttggtggaaaaaattaaaaggaaagaaatctctcccttgaaattcttaaccaaagtctctaccttctggagttagacatcatattatccaaacaattccatatcaatcattttgtgtaaagtagtactgagttggtagtggccccatatattacatctatacccacaaaagaattttttaaggacacatgggtacctctgtcacttgtcatctggttctcagtgttgacatggagcaatttgtaatctaaaaaacctgcagtcttatctaacaatactcaggtcctagggaaatatttctccatatctcttgcaatgagcctggtgtggtggtgcacctgtagtcccagatacagagatgaaaggatcacttgagcccaggagtttgaatccagcctgggcaacatagaaagaccctatctcttaaaaaaaaaaaaaggcaatgaaagaaattgaaaaggaaacaaacaagtgtcaagacatcccatgctcatgtattggaataattaataatgttaaaattagcatactacccaaagcaatctatagaatcaatgcaatccctatcaaaatatcaatgacatttttcacagaaacagaaaaagaattctaaaattcatatagaaccaaaatatcccaaatagccaaagcaatgctgagcaaaaatgacaaatgtagaggcatcacatttcctaacttcaaaatatacaacaaagctatagaaaccaaaacagagtggcattggtatgaaaggggaaacatagactaatggaacacaatagagaacccagacataaatccgtatatttacaaccaactgatttttgacaaagtgccaagaacatacattggggaaaggacaatgtcctcaataaatggtgctgggaaaactgaatatccgtatgcagaagaatgaaaccagatgcctatttctcaccacacaaaaaatcaactaaaaatggattaaaggctgtaagacccaaactagaaaaccactaaaagaaaacataggagaaatgctttaggacattagtttaggcaaagatttcatggctaagacttcaaaagcacaggcaacaaacatatagacaagtggcaatatattaaaccgaaaagttcctgcccagaaaagtaaacaatcagcagagtgaggagacagcctgtagaataggagaaaatctttgcaaactattcatctgacaagagacatatccagagtatacaaggaacacaaacaactcaacagcaaaaactcaaatcatccaactaaaaggtggtctataaattgaatagatatttctgaaaagaagatatacaaatgaccaacaggtatatgaaaaatgctcaatatcgctaatcatcagggaaatgaaaatcaaaagcacaatgaaatgtcatctcaccctggttagaatggctgaaagaaagaaaaaataaatgctggtgatgctgcagagaaaagagaaatctttttttttgttttttgagacggagtctcactctattgcccagggtggagtacaatgatgtgaactcagctcacagcaacccctgcctcctgggttcaagtgattatcctgcctcagcctcctgagtagctgggattacaggtgtctgccaccacacccagctatttttgtgtgtgtgtattttagtagagatggggtttcaccatgttggccaggctggtcttgaactcctgacctcaagtgacctgccctagtcggcctcccaaagtgctgggattacaggagtgagccaccatgcccagccagagaaaaggaaactcttatacactgttggtggaatgtaaattagtacagccatttactaatacagtatggaggtttctaaaaaaaaaataaaaatagaattactatatgatccaggtatcccaccactagatatttgtctaaagaaatggaaatcactgtataaaagggatacctgggaggggttccaagatggccgaataggaacagctccagtctacagctcccagggtgagcgatgcagaagacgggtgatttctgcatttccaactgagctttgaagagagtagtggttctcccagtacggagtttgagatgtcagaatggacagactgcctcctcaaatgggtccttgacccccgagtagcctaactgggaggcacctcccagtaggggctgactgatacctcatatggcccagtgcccctctgagatgaagcttccaggaggaacgatcagacagcaacatttgccgttctgcaatatttgctgttctgcagcctccactggtggacctgcagcaaactccaacagacctgcagctgaggtcctgactgttagaaggaaaactaacaaacagaaaggacatccacaccaaaaccccatctgaacgtcaccatcatcaaagaccaaagatagataaaaccacaaagatggggagaaaccagagcagaaaagctgaaaattctaaaaatcagagcgcttcctctccttcaaaggaatgcagctcctcgccagcgatggaatgaagctggacggagaatgactttgactagttgagagaggaaggcttcagacaagcagtaataacaaactcctccgagctaaaggaggaagtttgaacccatggcaaagaagctaaaaaccttcaaaaaagattagatgaatggctaactaggataaacagcgtagagaagaccttaaatgacctgatggagctgaaaactatggcatgagaactacgtgatgcatgcacaagcttcactagccgatttgatcaactggaagaaagggtgtcagtgattgaagatcaaatgaatgaaatgaagcgagaagagaagtttagagaaaatagagtaaaaagaaatgaacaaagcctccaagaaatataggactatgtgaaaagaccaaatctacgtctgattggtgtacctgaaagtgatggggagaatggaatcaagtggaaaacactcttcaggatattatcaaggagaacttccccaacctagcaaggcaggccaacattcaaattcaggaaatacagagaatgccacaaagatactcctcaagaagagcaactccaagacacataatcatcagattcaccaaagatgaaatgaaggaaaaaatgttaaggtcagccagagagaaaggtcgggttactcacaaagggaagcccatcagactaacagcagatctcttggcagaaactctacaagccagaagagagtggggaccaatatttgacattcttaaagaaaagaattttcaacccagaatttcatatccagccaaactaagcttcataagtgaaggagaaataaaatcctttacagacaagcaaatgctgagagattttgtcaccaccaggcctgccctacaagagctcctgaaggaagcactaaacatggaaaggaacaactgatatcagccaccgtgaaaacatgtcaaattgtaagaccattgatgctaggaagaaactgcatcaactaacgagcaaaataaccagctaacatcataatgacaggataaaattcacacataacaatattaaccttaaatgtaaatggctacagacacagattggcaaattggataaagagtcaagacccatcagtgtgctgtattcaggagacccatctcaggtgcagagacacacataggctcaaaacaaagggatggaggaagatctaccaagcaaatggaaaacaaaaaaaaagcaggggctgcaattctagtctctgataaaacagactttaaaccaacaaagatcaaaagagacaaagaaggccattacataatggtaaagggatcaattcaacaagaagagctaactatcctaaatatatatatgcacccaatacaggagcacccagattcacaaagcaagtccttagagacctacaaagagacttagactcccacacaataataatgggagactttaacaccccactgtcaacattagacagatcaatgagacggaaagttaaaaggatgtccaggaattgaattcagctctgcaccatgcggacctaatagacatctacagaactctccaccccaaatcaatgatatacattcttctcagcaccacaccacacctattccaaaactgaccacacagttggaagtgaagcactcctcagcaaatgtaaaagaacagaaattataacaaactgtctctcagaacacagtgcaatcaaactagaactcaggattaagatactcactcaaggaggagccaagatgcccgaataggaacagctcctgtctacagctccagtctacagctcccagcgtgagcgacgcagaagacgggtgatttctgcatttccagctgaggtaccgggttcatctcactagggagtgccagacagtgggcgcaggtcagtgggagcgagcaccatgcgcgagccgaagcagggcgaggcattgcctcacttgggaagcgcaaggggtcagggagttccctttctgagtcaaagaaaggggtgacggacggcacctggaaaatcgggtcactcctacccaaatactgcgcctttccgacgggcttaaaaaacggcgcaccacgagaatatatcccgcacctggctcggagggtcctacgcccacggagtctcgctgattgctagcacagcagtctgagatcaaactgcaaggcggcagcgaggctgggggaggggcgcccgccattgcccaggcttgattaggtaaacaaagcagccaggaagctcgaactgggtggagcccaccacagctcaaggaggcctgcctgcctcagtaggctccacctctgggggcagggcacagacaaacaaaaagacagcagtaacctctgcagacttaaatgtccctgtctgacagctttgaagagagcagtggttctcccagcatgcagctggagatctgagaacgggcagactgcctcctcaagtgggtccctgacccctgacccccgagcagcctaactcggaggcaccccctagcaggggcacactgacatctcacacggcagggtattccaacagacctgcagctgagggtcctctctgttagaaggaaaactaacaaacagaaaggacatccacaccaaaaacccatctgtacatcaccatcatcaaagaccaaaagtagataaaaccacaaagatggggaaaaaacagaacagaaaaactggaaactctaaaaagcagagcgcctctcctcctccaaaggaacgcaattcctcaccagcaacggaacaaagctggatggagaatgactttgacgagctgagagaagaaggtgtcagacgatcaaattaccctgagctaggggaagacattcaaaccaaaggcaaagaagttgaaaactttgaaaaaaatttagaagaatgtataactagaataactaatacagagaagtgcttaaaggagctgatggagctgaaaaccaaggctcaagaactacgtgaagaatgcagaagcctcaggagccgatgcgatcaactggaagaaagggtatcagcaatggaagatgaaatgaatgaaatgaagcgagaagggaagtttagagaaaaaagaataaaaagaaatgagcaaagcctccaagaaatatgggactatgtgaaaagaccaaatctacgtctgattggtgtacctgaaagtgatggggagaatggaaccaagttggaaaacactctgcaggatattatccaggagaacttccccaatctagcaaggcaggccaacgttcagattcaggaaatacagagaacgccacaaagatactcctcaagaagagcaactccaagacacataattgtcagattcaccaaagttgaaatgaaggaaaaaatgttaagggcagccagagagaaaggtcgggttaccctcaaagggaagcccatcagactaacagcggatctctcagcagaaaccctacaagccagaagagagtgggggccaatattcaacattcttaaaagaattttcaacgcagaatttcatatccagccaaactaggcttcataagtgaaggagaaataaaatactttacagacacgcaaatgctgagagattttgtcaccaccaggcctgccttacaagagctcctgaaggaagcactaaacatggaaaggaacaaccagtcccagccgctgcaaaatcatgccaaaatgtaaagaccatcgagactaggaagaaactgcatcaactaacgagcaaaataaccagctaacatcataatgacaggatcaaattcacacataataatattaactttaaatgtcaatgtactaaatgctccaattaaaagacacagactggcaaattggataaagagtcaagacccatcagtgtgctgtattcaggaaacccatctcatgtgcagagtcacacatcggctcaaaataaaaggatggaggaagatctaccaagccaatggaaaacaaaaaaaggcagggattgcaatcctagtctctgataaaacagactttaaaccaacaaaattcaaaagagacaaagaaggccattacataatggtaaagggatcaattcaacaagaagagctaactatcctaaatatatatgcacccagtataggagcaccaagattcataaagcaagtcctgagtgacctacaaagagacttagactcccacacattaataatgggagactttaacaccccactgtcaacattagacagatcaatgagacagaaagtcaagaaggatacccaggaattgaactcagctctgcaccaagcagacctaatagacatctacagaactctccaccccaaatcaacagaatatacatttttttcagcaccacaccacacctattccaaaattgaccacatagttggaagtaaagctctcctcagcaaatgtaaaagaacagaaattataacaaactatctctcagaccacagtgcaatcaaactagaactcaggattaagaatctcactcaaaaccgctcaactacatggaaactgaacaacctgctcctgaatgactactgggtacataatgaaatgaaggcagaaataaagatgttctttgaaaccaacgagaacaaagacacaacataccagaatctctgggatgcattcaaagcagtgtgtagagggaaatttatagcactaaatgcccacaagagaaagcaggaaagatccaaaattgacaccctaacatcacagttaaaagaactagaaaagcaagagcaaacacattcaaaagctagcagaaggcaagaaataactaaaatcagagcagaactgaaggaaatagagacacaaaaaacccttcaaaaaattaatgaatccaggagctggttttttgaaaggatgaacaaaagtgatagaccactagcaagactaataaagaaaaaaagagagatgaatcaaatagacgcaataaaaaatgataaaggggatatcaccaccgatcccacagaaatacaaactaccatcagagaatactacaaacacctctacgcaaataaactagaaaatctagaagaaatggataaattcctcgacacatacactctcccaagactaaaccaggaagaagttgaatctctgaatagaccaataacaggagctgaaattgtggcaataatcaatagcttaccaaccaaaaagagtccgggaccagatggattcacagccgaattctaccagaggtacaaggaggaactggtaccattccttctgaaactattccaatcaatagaaaaagaggaaatcctccctaactcattttatgaggccagcatcattctgataccaaagcctggcagagacacaatcaaaaaagagaattttagaccaatatccttgatgaacactgatgcaaaaatcctcaataaaatactggcaaaacgaatccagcagcacatcaaaaagcttatccaccatgatcaagtgggcttcatccctgggatgcaaggctggttcaatatacgcaaatcaataaatataatccagcatataaacagagccaaagacaaaaaccacatgattatctcaatagatgcagaaaaagcctttgacaaaattcaacaacccttcatgctaaaaactctcaataaattaggtattgatgggacgtattccaaaataataagagctatctatgacaaacccacagccaatatcatactgaatgggcaaaaactggaagcattccctttgaaaactggcacaagacagggatgctctctctcaccactcctattcaacatagtgttggaagttctggccagggcaattaggcaggagaaggaaataaagggtattcaattaggaaaagaggaagtcaaattgtccctgtttgcagacgacatgattgtatatctagaaaaccccattgtctcagcccaaaatctccttaagctgataagcaacttcagtaaagtctcaggatacaaaatcaatgtacaaaaatcacaagcattcttatacaccaacaacagacaaacagagagccaaatcatgagtgaactcccattcacaattgcttcaaagagaataaaatacctaggaatccaacttacaagggatgtgaaggacctcttcaaggagaactacaaaccactgctcaaggaaataaaagaggatacaaacaaacggaagaacattccatgctcatgggtaggaagaatcaatatcgtgaaaatggccatattgcccaaggtaatttacagattcaatgccatccccatcaagctaccaatgactttcttcacagaattggaaaaaactactttaaagttcatatggaaccaaaaaagagcccgcatcgccaagtcaatcctaagccaaaagaacaaagctggaggcatcacactacctgacttcaaactatactacaaggctacagtaaccaaaacagcatggtactggtaccaaaacagagatatagatcaatggaacagaacagagccctcagaaataacgccgcatatctacaactacctgatctttgacaaacctgagaaaaacaagcaatggggaaaggattccctatttaataaatggtgctggaaaaactggctagccatatgtagaaagctgaaactggatcccttccttacaccttatacaaaaatcaattcaagatggattaaagacttaaacgttagacctaaaaccataaaaaccctagaagaaaacctaggcattaccattcaggacataggcatgggcaaggacttcatgtctaaaacaccaaaagcaatggcaacaaaagccaaaattgacaaatgggatctaattaaactaaagatcttctgcacagcaaaagaaactaccatcacagtgaacaggcaacctacaaaatgggagaaaattttcgcaacctactcatctgacaaagggctaatatccagaatctacaatgaactcaaacaaatttacaagaaaaaaaacaaacaaccccatcaaaaagtgggcgaaggacatgaacagacacttctcaaaagaagacatttatgcagccaaaaaacccaggaaaatatgctcatcatcactagccatcagagaaatgcaaatcaaaaccacaatgagataccatctcacaccagttagaatggcaatcattaaaaagtcaggaaacaacaggtgctggagaggatgtggagaaataggaacacttttacactgttggtgggactgtaaactagttcaaccattgtggaagtcagtgtggccattcctcagggatctagaactagaaataccatttgacccagccatcccattactggatatatacccaaaggactataaatcatactattataaagacacatgcacatgtatgtttattgcggcactattcacaatagcaaagacttggaaccaacccaaatgtccaacaatgatagactggattaagaaaatgtggcacatatacaccatggaatactatgcagccataaaaaatgatgagttcatgtcctttgtagggacatggatgaaactggaaaccatcattctcagcaaactatcgcaaggacaaaacaccaaacaccgcatgttctcactcataggtgggaattgaacaatgagaacacatggacacaggaaggggaacatcacactccggggactgttgtggggtagggggaggggggagggatagcattaggagatatacctaatgctaaatgacgagttaatgggtgcagtacaccaacatgtcacatgtatacatatgtaacaaacctgcacattgtgcacatgtaccctaaaacgtaaagtataataacaaaaaaaaagacaggtgtaagaaattataaaagtattaattttgggaactgataaatgtccatgaaatcttcacaatttatgttcctctgctgcagttccagccagtccctccattcggggtccctgacttcccacaacaacacacttcatggggggacatagggtgaactactacacttcaccaaccagccaggacacattccacacatcaagctctgagagggatggcagatggtcatcctccaggtccagagctatgcccactggcaggacatcaccaggcaccgcatggaggtgatcagcaacttttcccagcagcacttcctcggggaggtggattaccttgtgtgtgcagatgtggacatgaagttcaacaaccatgtgggtgtggagatcctctcttccctgtttgccaccatccatcctggcttctatgggttccatcgggacacctttgcctatgaatgccagcctcagtcccaagcccattttcctgagggtgaaggggacttttattatataggggccttatttggtgggtcagtgctggaggtttacaggctgatcatggcctgtcaccaggtgatgatgattgaccaagccaaccacatcgaggccctgtggcatgacgaaagcctcttaaacaagtacctgcttaaccacaaacccactctcccttgagtacatgtgggattaaaaagtcgatggagtatacgttggatgaatacctggtgggtttgtgcaccatgataaactgcaagagatctgtggtcttggtaaataacaatgaggaaatgtgaactgatgagggaagcttccagaaagagaccagagagggggtgattgccagtcagcccgtatcttcctcctgaaatgctaccctgatttaaaatcagctttacaataaagagtatgactccacctattttcgtctggttataaaaaattgctaatgcctctcatcatctcctcaaatttaggaggccccagcacaaccccgctaccacaaccaccaccctatacacacatttaggcaggccttattccacagctcatgcacacgtttttcagtttcacccccttgagcttctcactgtgttctcctaaaacactcttcggggtggaggaggtgagtggtgtctgcccgtcctgacagataagggatctgtgatgagatcttttccagagcaaggaatcaggccccttaataaagaagagtaggctgggtgcagtgactcacgcttgtaattccagcactttgggaggtcaaggtgggtggatcacctgaggtcaggagtttgagaccagcgtggccaacacggcaaaacgctgtctttataaaaatacaaaaattggctgggtttgatggcgggcacctgtaatcccagctacttaggaggctgaggctgaagaattgcttgagcctgggaggcggacattgcagtgagccgagactgcgccactgcactccagcctgagcaccagagtgacactctggtctaaaaaataaaaacataaagaagagtagatttgtgatcttggcacagaatgactgtgtaatgcaaatccaatcagtgaggcatccagaaatggctcagagaggagcgatgtcccagcagcctgacccctccccctagtgtggtgtcctaaattgggttagtccatttgcattgctataaagaaatgcctgaggctgggtactttacaaagaaaaggtttacttggctcatgattctgcaggctgtgcaagcatggcaccagaatctgctctgcttctggtgaggtttcaagaagcttccaatcatggtggaaggcagaaggggagcaggtgtgtcacatggcaagagaaggagtgagagagtgaagggggaggacccaggctcttataaacaaccagctctctctcatgtgaactacgagtgagaactcatttttgtcatggggagggcaccaagccattcataaaagattcacccccatgacccaaaccctcccactaggcccagttccaacactgggggccacattgcaacatggatttggagggaacacacatccaaaccgtatcataaaagcagttttcacagaaagcatgtaactctgcctccttttcctatctgattgagaaaaaaaattctgaggcctcacaccacccccaaatttaggcaggcctaatacgatgccatcctctagtctcccaccaacaccaaacacacactttcacacaaataagaaacacacttttttttttttttgagatggagtctcgctctgtcgccaagctggagtgcagtggcgcgatcttggctcactgcaacctctgcctcctgggttcaagtgattctcctgcctcagcctccctcccgagtagctggaactacaggtgcgtgctaccatgcccagctaatttttgtacttttagtagagatggggtttcgccatgttggccaggatggtctcgatttcttgactttgtgatctgcccgcctcagcctcccaaagtgaagaaacacatttaggcagacctgacttctggactcaggctcaagttcctgagttgccaccaccttgagctttttaatgtgcattcccagcttccttcagggtggatgcagtgtgtggtctcagcccaacctgggatataaggaatcagagatgagatctattccagaacaaggaagagcctcctggacacagtctcctgcctcctgtgacagtcacacaagggcctgtctctgcccttggccaaactgatgcacaaaggtcttcagctctaaatcaaattacttcctcttgttagagtccttgtaaaagctgaaaggccgtttagtgtgcagaagaacgtgatgccaaataaaaccctctttcctggcactgaagttcttgtttatcccaaaatattgccagctgtccaccaggggcaaagcgggtctctctcactctccccccacccactgatggactccatgccacctccattgatcaatttagtaacttattaaggacttgccagctctttaaaaactgaaaaaaaatatatttctagatgcaaataagaatcaattcaaattattacaaaaacttgcctcttaaaaaatttgttcattgtccttcagcaaaggcctgaaatcctacatggcaggtatctgaaatccagcattttcttgtcttgctttcttttggacatatcaggacaaacagtttgtccatctttctgttaggttttgaa[131 bp omitted]gaaaccctgtctctactaaaaatacaaaaattatcaggacatggtggcacgcgcctgtagttccagctactcaggaggctgaggcaggagaatcgcttgaacctgggagatggaggttgcagcgagccaagattgtgccactgcactccagcctggcaacagagcgagactccatctcaaggaagaaagaaaggaagaaagaaagaaaggaagaaagaaaggaagaaagaaagaaagaaagagggagggagggagggagggagggagggagggaaggaaggaaggaagaagaaagaaagaaagagaaagaaaaagaaagaaaggaagaaagaaaaagaaagagaaagaaagaacgaaagaaagaaaagaaagaacgaaagaaagaaagaatggcgggcaggaaggagggagggaagcaaggaaggaaggaaggaaggaggagaaagacacagagagagagagagatggtggctctactgcaatgtaggttttatttggaggtgggggaccagcttaatgcgagggcgcactgctgcttacagctagtgcaattagatgcctgggtaggggtctgggggggtatggcttactacccaggaggatattgataagatgttcccataatgaggtggtttggccctttttctggcaggatgtgataatgaggtcccttggacttttttcccagcaagatgtgataagaaattcaggtggttagggcggggtgcagtggctcacgcctgtaatcccagcactttgagaggccgaggcgggcggatcacgaggtcaggagatcgaggccatcctggctaacctggtgaaaccccgtctctactaaaaatacaaaaattagccaggcgtggtggcgggcgcctgtagtctcagctactcaggaggctgaggcaagagaatggtgtgaacccgggaggcagagcttgcagtgagccgagatggcgccactgccctccagccattgctggaacacgaattaaaagaaattaaagaatgtgtaagcaaaaactcagctatatataaaaaaacccaattccccctgaggaggagaaagagctggagtccttcaaaattagctgcctgtttttccttctgtggctagtgagccttaactctccctttcccagacattgtgaagaccctgtttagctgtgcagctgcaaggtcactagacagataatcttaagtcttaatacatgtcgttccttgaaaagtaagaaataatgtaatgcatgtctcaattaaataactctctttgtttctggcttctgtaatatgcttccccctgcacagatctgcccccaccccacgaaatgcttaaaaggtagcttaactctttgttcagggctcagtcctttggatgttaatccgactaggtcagtgcacttaaataattaaataattcctcctcaacccctcggcctaattccttaattatcctgcagcagggtgacagagcgagactctgtctcaaaaaaaaaaaaaaaaaaagaaagtcaggtggttgggcagaatgtttctcacagcccgaacccctgtggaatgtttcactttgaccaaggtctgtgaaatggtggggggcttacaaaataatgcggtttggactaatgctttccttgtttttcacggccttggtagtcttcaagaggcctggccaggtggaatgccccccagtctgagtttgtctggtgcttccttaccatgagactggggtcttggagttttgaggttttggaaagacacctcagaagttaagtatctttcttgtcacattgcattaggggggtacatggtatcaatatctcttttctctggtgatgtaaaacttgatcatttgaataatgtagtctttcatggtttttttatccactgtaaagttgctatgtgttcctccctctactgtagtctttggaaaggagtcaccaagtcagcccacccttaaagagggagaatatttagtctccacctcccggaagaaggagcatccatatgtattatttgcaatttgtctgtaagataggtttgtctaccccattaaaaagtgggcaaaggatatgaacatacacttctcaaaaaaagacatacatatggccaacaaacatgggaaaaagagctcaacattactatcattaaagaattgcaaatcaaaaccacaatgagataccatctcatgccagtcagaatggcgattattaaaaagtcaagaaacaacaaatgctggcgaggttgcagagaaataggaatgcttttactctgttggtgggaatgtaaattagttcaaccattgtggaagacagtgtggcaatccctgtaagatttaggaccagaaataccatttgacccagcaatgccattactgcgtatatacccaaaggaatataaatcattctactgtaaagatacatgtatgcatacatatgttctttgcagcactatttgcagtagcaaagacatagaatcaatctaaatgctcatcaataatagactggataaagaaaatgtggtacatatataccatggaatactatgcagccatagaaaggaattagatcatgtcctttgcagggacatggatgaagctggaagccattattctcggcaaactaaggcaggaacagaaaaccaaacactgtatgttctcacttataagtagcagctgaacaacgagaacatatggacagggggaggggattaacacacactgggccctgtcaggggagggtgtgaggggagagcattagggaaaagagctaatgcatgctgggcttaatacctggatgatgggttgataggtgcaacaaaccaccctggcacacgtttatttatgtaacaaacctccacatcctgcacatgtaccccggaacttaaaaaataaataaaataattatttttaaaaagatatatttgcctcttcttggctgagtgtggtggctcatgcctgtaaatccagcactttgggaggccaaggcaggcggatcacttgagtccaggagtttaagaccagcctggccaacatggtgaaatcccatttctactaaaaatacaaaaattagccaggtgtggtggcttgcacctgtaatcccagctacttaggaagctgaggcatgagaatagtttgaacccaggaggtggagtttgcagtgagctgagatcgcgccactgcactccagcctgggcggcagagcgagactgtctcaaaaaaaaaaaaaaatttgtcctttctttcttgtttacttattcatttatttatttatatagttatggacttatgtgtcttattttaaactttgggtattaatccaataactttgggttattttggtgtgcatatctttccagcttgggccattaggagctcttcaaagaagatttctttctgtcagaggatttttgttttgttttgttttgtttgagacagggtctcaccttgttgcccaggctggagtacagtggcgtgatcttggctcactgcaacctccgcctcctgggttcaagcgattctcttgcatagcctctcaagtagctgggactacaggggcacatcactacgccaagctaatttttgtattttttgtagatatggggtttcaccatgttgcccaggctggtctcaaactcctgggctcaagcaatccacctgcctcggcctcccaaagtgctaggattacaagcgcacctgtcagagttttcagggacgtggatgaagctggaagccattattctatcttgtttgtgccatcacactcctctcctagggtagaaggtaaagttccacccttgagagagtttcaacagagccaagtttctggtctgtaggccctcaggtcccgtagtgacctctgggaagtgaggcgggggagggcagctgatcacagggggtccctcagagcctctggtgcaggtcgtgagtcacacacactccgctcgctggcatttctggacagcctctaaagctcaagcccacttagggtcatgttcgccaatggaaaaaggcgagactgccagaagggatgagactggctcccctaggaatcaagaactcccaagaatttgttcctttaagagtgagcagaaagttgctggcagaatttgacaactgaattgtggtaggtagaatggagcatgaccagccctggagtcaaccaatatggctgcaagtcctggaacttccctggcagtgatgggctcagaggccaaaagatagcatccacctggccttgaggcctgatgcggaggatgcagctggtaagatgttcagggggccctggtcaggcccacatcccccatactttcctccaggactcaaactaaggccaaagccagttttctctgaccggcctgttgtggtgtacacctgtccttgcctccccactgacttttagctccacattttgggtgagtcttgcatgggaagttagtacaggtgggagaaggatgtgaccaggatgcaaaggtgacagtcggggctgggaaaacataacgattttaatgtttctaaaacggagctgacagacaattcacaggacgaggaggtttcttcacagaaacccaaactcagatgctgcccctctctgggttcagccccagcatgccctcaagcacctcgcatctccttcctgccccagcccgggcaggcgctcattctcctgttactgggtcatgagggagccgtcctcatcctaatctgtctgacattagccccgtctccacactgggctggttctcactgaggtctgcacggaatgaccaaggagaagatttcatccttgcagatgaggagtgggtgatcctggggaatgggaaccctgctgtgggcccaggacttttgcaggagccctttggtcctcctagtcagactttctgatttagttttcaccaggctgattccagtaaaacaactgcaactcaactctcagagcccagggacggtgtcctgtgtgtggcgcgtgggaggcccagcaggagatcttgggacatggtgaggggttgtgacacgtgaggccattgagaacatgtggactggaattaggcagagccaggataggtctaggccctgccgctgactagctgtaggatcataggtaagccgttttatctttctgaagctctgtcctcatttgtaaaatgaggacccagctaaataacatacatgtcaccccaggattcatcagccttgggaggttacaatgacatcaacagccatagaaagcctttctctggctctgcctttattggagctgcagagtctgcaggccctggaaggcctggttgaaaagtgactctagaaatgacctgcatgagctcatcacaagcccttttaatttaatctcttcgtagcgtctgtgattttctgctattttcctgaggaggctgaaatttctgcaaagacgctctccatagatgctgagcatagaggcttcggttgcttctgcattctactactgggaccaggactcccacctagtcttggcccaggaggaaggaagaaagagagtggagggagaagctaacgtagagggagtgttggtgtcaggtacttgtaggatctgccacctggggcaaattacaagatgccactgagcctacttccaaatgcatcgaacagggccactttatctcccagcaggccagtcatggggctaaggtgtagagactaggttaggtgagttgtgtgtgactgaaagacagaaaccaggtttcacctgcacttttacagagagtagagcagtgccaggctccagtgagtatggcccacaaaaaagtgggaaaataagtagtgtctctattgtctgagtcttgctggcataattaggtctcatgcagagagttaaacttgggacttggggctaagaggcctgaggcttgagttccggccctcgtctgacctgctggacaaacccaggcattgtgcttcatttgtttactcattttaaagcttgattttacatctaccaagtgctgggcactctgctagacttaacattagatgtacatattatactgaaaggtacagcattttactgagaagtacaacatgaaatttgaacagatgaagaactaaattgcgctcttgtatggcgtgagtccaccttgtagggatgttaactcttcccagctcatctttgtttcaaaggaaattaatcaagtttatccaaaagaataaatgcttgaaatcagtcaagaaaacttagtgtctgggatttacatgaggaagaattcaaaggttgcgtggattagaaagggaggcatccagaatgatgaggaaatcaggagtagatgaaaatatctattatttggcaaccctaataaggtataataaatattaaagaaacaagtgacacagtttttacctgtcaaatttgaaaaataaaaatatattctgagcacataatttcataaagaagagtacatatatctccacactcacatactcttgtggggatgaaaataga[137 bp omitted]tggcgaaaccccatctctactaaaaatacaaaaaaaaaaaaaaaaaaaaaaaaaagctgggcacggtggcgggcgcctgtagtcccagctactcgggaggctgaagcaggagaatggcgtgaacccgggaggcggagcttgcagtgagccgagatcgccccactgcactcccgcctgggggacagagcaagactccgtctcaaaaaaaaaaaaaaaagaaagaaaaaagaaaaaagaaaagaaagtttttaccttatcattaaatagttatttcataaatacatcatttcaaaaattatctcataaataaatcctaagaaaataaacatagcaaaattaaaagaaacctacttaaaagtgaaataataagaatggtgggacgtatttgtagtcattgaaaataatgcttttgaagaccatttaaagatgtgaaacatgctaatgtaaaataaacataaaatgtaaaagacaaagtatgaaacttaatatttattttaatttaaaaattagaatacatatgtattgacaaaggtaaaacagatgaaactgtgagatcatctatggtagtgggattctggaaaattgttgttttccttttttttcaacctttttgtattttctcagttttaattgagcttgtgttacttttacagtttgaaaagaaaaagggggcggggagaaaaaaccaccaccggcaagacagtgggagggaaaaaaatcagtaatctatttttatgcagacaccaggcattttctgtttgaggttaattaccaagtttatttaactagaattccattctaatcaaatgttcatctgtgagaatgtcctgatatattttcttctgttttaatcttctgctagtgacatattataacaatgtatgtaagatactgaacaagaaagagaaaaaggcagtccttgggtttggtgcac[132 bp omitted]cggtgaaaccccgtctctactaaaaatacaaaaaaatggccgggtgtggtggcgagcacctgcctgtagtcccagctactcgggaggctgaggcaggagaatggcttgaacccgggaggcggagcttgcagtgagccgagatcgcgccactgcactccagcctaggcgacagagcaagactccctctcaaaaaaaaaaaaaaaaaaaaaatttaaaaaccaaattaattcaataggattttgtgctttgcgcttcccctggtctccacagaactgtgacacagcgtactgaggaaactctttgccttacactaaacctcacaggtcctgaacaatcaagagctttgagaagatacacaactctgacggcttctggagagagcatgtctctctttcccctgggctccatgccagcttgccagaatttttacaatttgttttcctcatttttctaattatgtttcctcctgaaagtgattatagatagaattcatttgtatttgtggagacttctttatcagatcagcaagttttcctttttttacgagttaatactttcatctttagggttctcagggaatacacagcatatgtcaaaacaaaaatgagatgaaaattcctaggtaattttttttttacttttattttaagttcatgggtacatatgcaggtttgttacatacgtaaactcgtgtcacgtgggtctgttgtacagattattttgtcacccaggtaccaagcctagtacccaattgttactttttctaatcctctccctcctgccaccctccaccttccaataggctccagtgtgtgttattcccctctttgtgtccgtgtgttctcatcatttagctaccacttataagtaagagcatgcggtatttggttttctgttcctgcattagtttgctaaggataatggcctccagctccatccatgttcccataaaggacacaatcttattcttttttgatgactgcgtggtatcccatattttccatcatatgtatcacattttatttatccagtctgccatcgatggacatttaggttgattccatttctttactactgtggagtgctgcaatgaatacatgtgtgcatgtgtctttatggtagaatgatttatatccctttgggtagatatccttactgggttatttatgcctaccaccaggcaaaaataaaataaagaaaagggcttcagacgttaaagacttatcaatagaccttttttatatgaatgtgtatggctgtgtgtgtgtctcaatatactgttgcactggagctgctgctggtttttttaaattcacaagcccctttcacatgaaaacagtgttatggttgggtttccacaaagatctattcatatctgaagtatatctctctattttaaaaacgtttttattgctaaataaggcacatacgccaagaagagaaggtgttcacgtatatgaacactttaaggaataatagacaatgaacacctgtgaatccaccatgcaggtgagctcacggtgcagagccccctggatccctcctcacctgcatgcagtcctggtccaccctcctgcctctattctgcactttttattagtcatccttgcttttcaaaatagtttaataatgattgcatggctccacctataatttacttttatttgcttttcaccattagaaaagcagaatcaggcagggcatggtggctcacatctgtattcccagcactttgggaggctgaggcgggtggatcactggagtccaggagttcaagaccagcctgggcaacatggtgaaatgacgtctctactaaaaatacaaaaattagccgggcatggtggcacaccacctgtaatcccagctacttaggagtctggagcacgagaaccgcttgaacctgggaggtggaggttacagtgagctgagatcaggccactgcactccagcctgggcaacagagcgagactccatctcaaaaaaaaaaaaaaagataagcagaatcatactgtatatattcacctggaaccttttcttttgctctacattatgcatcaatttgtcaacttggagtttattcattttaatgtctgcgtagtatttttttgtatttacaatttatttattcattatactgttcccaagttcttgacattataaacagaactgtttgctggacacacccaatttttaaaaacttttaatatattttgtttaaaaaatgttttaacttttaagttcagggatacatgtacagaatgtacaagtttggggtttgttgtaaagattattttatcacccaggtattaagtgatacccaatagttatttttcctggtcctttccctccacccaccctccaagctccaataggccccagtgtgtgttgttctactctatgtgtccatgtgttctcatcatttagctctcacttacaggtgagaacatcagtattttgttttctgtttctgcattagtttgctaaagatatggcctccagctccatctatgtcccttcaaaggacttgatcttgttcctttttacagctgcatagtattccatggtatatatgtaccacatatgctttatccagtctatcattgatgggcatttgggttgattccatgtctttgctattgtgaatagtgatgcaatgaacatacacatgcatgtgtctttctttatagtaggacaacttacattcctttgggtatatacccagtaatgggactgctgggtcaaatggaatctccacaccatcttccaaaatggttgaactaatttacactctcaccaacagtgtataagtgttcctttttctctacaacctcactagcatctgttagtttttgactttttaataatagccattttgactggtgtgagatggcatctcattgtggagacacccagtttatccagggtttagaattgtagaagttaaattttctcattgtacaatatgtgcatattcagctttattaggcaatgttaaatgattgaattatccagcttttaaatttctgccacctaacagctcattctggttttaatttgcttgacttgcattaaataataaagttagatatcttttttatatttaatggctggtgttgtttggctgtgcctgacccaaatctcatcttgaattgtagctcccgtaatccccacatatcatgggagggacctggtgggaggtaattgaatcatgaaggtgggtttttcccatgtttctcttgtggtagtgaataaatctcatgcgatctcatggttttataaagggcagttcccctgcacatgctctgttgcctgctgcaatgtaaagatgtgcctttgctcctccttcaacttctgccatgattgtgaggcctccccagccatgttggaactgtgagtccattaaacttctttttctttataaattacctagtctgtagtatttcttcatagcagtatgaaaatggagtaatacaatggctacttgagttttcctttctgtgaaatgcctaatagcatatatttccccacatttctattggcctatgtttaattttcttattgaatcattagtgttctttacatgagtccttttcagttatatatgatgcagatatcttcttccagttggggtgtatgtttcatgctctttgtgacatctttgattaacaaagtccttgaatttagctgtgttttcctttggggcttacgcttattgcattgtctttaaacattcttctttaccttgaaatcataaactattttcctatattttcttttaattgaattgttcttttcctttttttgagacaaagtctcactgtgtcacccaggctggagtgcagtgatgcgatcttagctcactgcaacctctgcctcccgagttcaagcaattctccttcctcagcctcctgagtagctgggattacaggtgtgcgtcaccacgcccagctgatttttgtatttttagtagagacagggttttaccatgttgaccaggctggtcttgaactcctggcctcaagtgattctaattgaatttttaatataagctgaagttagggatttgttttcatttttttcagtatcatagccaatcaattattcaagcatgctttattgattgggccatcttttctcagctaatctgtgttgcctcctcagtcatgtgtcagattcccatacatgaatatattactccctcacctttaggttagctcctgctggaagtctgatagatgtatattgaacttcttgacctaccctctgatctcataaacttaataccttacttccaaactaaccctattagataagtacattttctattatattcaataattcaagcatgttcagtccagctagtcagattgtatattttgtgtgtctgggcatgtgtgttttctgttgtatttccatcatgataatttatttcctcatgtgttttgtaattttttaaactgtgagaccatgatccttaatctttcagaaaataactggttttccatttgccagggacctagccatgcctgttcctgtgtgtaaaagtacactggagtgtaaaagtacactggagaactgtattcctgggtctaaattgtaaaagtaataaattgaacaaaaacacaattcaatgaaatatgtcttttcctcctaccttgataaatattttttcataatgacaaaatagaaacaaattcgaaaatccatggattttataggactagaagttgtccaaaaaaaatcaaagatgaggaaatttcattattgttattatgcatgcctatgtgttctcttgataggctggtgaagtttgggttcattattgtgaaaataagtaaaagggaaactaacacaggcctattgtaaactaacactagctcaggaatgtgtgtatgtgcaagagcagctatgctagtcaaagatatgtgttgcaacctcccatagagagacacgtgtcagcttcaatcccaaggcctataaactaaagttgaccacttcctgtgtacctagagtctgttaaatatttcattgatgggtactggttgtaaacttgtttatcagatgtaaaacaaggtaagataatatcaattatccttccaccaggccctaagttgcctccatctcctacccactcaaccacacatttgctttactttacgtataacctctctaaacaccgatccaaatcacaggaatgtaatggttacttcactgcccaccctctgtaccacagtatcccccattaaaaaaaatatatgttaatactgcgctttatgtaattgactttggaactcagttacagactgctgtaatcctggcttccccgatgtgcactctcaagctccaggttagtaaacctcattagattgtgatccctgtctcagtccctcatttgggttgacattaccaaaaatttattttattagtctatatttactctacaaaatttatttttcttgccttcattttaacaaaatcagtaaatatgttataatcgtggttttgcacatcatctgttctattaaaaataacaagctaaaataggaaaatgaaatgtaattaacagtgatatcagcaaaatagtggagtaggcagctacaaactttcatcctcccacggaaacataaataaaaagcagggccaggcatggtggctcatgcttgtaatcccagtactttgggaggctgagctgggaggattgctttaggccaagcgtttgagatcagcctgggcaacatagcaggaccccatctctacaaacagacaaacaaaaaccagcagaaattattaggaacaactttgctagaactctggaaaaccatcaaaggtttacaccaaccaagaagatgctgaatcaagaaaaagttaagttaaagtggtaggaaagctttgtgcattcttactggcctttgccccacacacttttcagctcagtggcagttctgaagacttcagttcgcattcccaccataggatcctgttccctggttccagagggagcagagcagaccttactcacaaattatcgtgtattgctgtgctagcctgcttaggggacacatgaaggaccaatgcaaagtgttcatttccaattaatctaacttcaagtcacacaggctggaaaagtgacagacattgcttgaaaatattgtaatgcaaacaacctgaagtcgtgtagggcaaaagttatggttgaaagaaacaatagaccacctaagccagagaggaagagtaggaagagagttgttctgggaaattacggcattaaaagcacccttaaatatggctaaatttagaaaattccatgcatgttcaaggcaagacacatgttcagaaagacctgaaaagacagacccttagctttcaccttgggctggtccctaggctcaataaaagccttgctaagtgttgatgaaggccatagcacagagccatctgaaaatactggaagagatagcttcttcttccctcatctgttttttgtttctttgtttgtttgtttattgccctgccccaatgcctttctctctgacagccagctgtcagtctggctggattgaggaatacctagaaattgggtaaagcattattttgggtgtgtctgtgagggtgtttccacaggagattaccatgtgagtctgaatggactaggtggggaagattcatcctcaatgtgggtgggcaccatccaatttgcttggggtctggagagaacaaaaccagagaaaaggtgaatgtgtcaatctatctgtgcgaactgggatacactcttcctctgctgtccctggacaacaactctaggctccccagcctttggactccaggacttacaccagtgattcctgggttctcaggtctttggcctcaaactgagagttacaccatcagcttccctggttctgagacgtttagacttggactgggccatgctacaagcatcctcgggtctccagcttgcagatgtcctgtctcaggacttctcagcttctataattacatgagccaatccccctaataaatcccctctcatatgtctgtgtctctatcaatatatcctatttattctgtctccctggagaatcctaatacactttatctttctctcttttttgcccctggcattcaaggaatactcggtcaaaacagtagctgaacacaagctaaggaagagagacatcagttgtgacacataacaagaaaaacagtctatgcaaaagtagttgcagaaagtcagtaaacaattgaactactatagcttccaataattaaaataaatcaacaaaccctgggtaaggtgaaaatatgatttccagaattatcatactgtcactttcaaatggcccattcaaagggaaaaaataaattgacagaaactattcctcaggaagctcagatattggacttatgagacaaagactttgaaacaaccattttaaatatggtcaaagagtgaaagaaaaacatggacaaagaattaaggaaatcagaaaaatgatgtttgagtaagttgtgaatatcaataaagagatagaaattacaaaaaggaaccaaaaaattctgaagctgacaagtacaataattacagtgaaaaactcactattggggttcaacagtagatttgagcaggcagaagacagattcagtgaacatgaacacaaaacaatgaaaagtatctagtctgaggagcaggaaaaaaaaatgaagtgaaaaaaaacataagacctgcaggacaccattaggcacgttaacatatgcagtaagggattcccagaagcaagagagaaaaagaggaagaaataacatttgaagaaagaatgcctgaaagcttcccaaatttgatgaaatacatgaatctacgatcaatgtgttagtccattctaacgctgctatgaagaaatacccaacactgagtaatttataaaggatggaggtttaattgtctcacagttctgcatggctgggaagacctcaggaaacttacaatcatggcggaaggggaagcaaacacatacttattcacaaggcagcaggagagagaagtgtcaagcaaaggggaaaaagtcccttataaaaccatcagatctggtgaaaacttgctcactattttaagaacagcagcataagggtaactgcccccataactcaattacctcccactgggttcctcccatgacacatggggataacaggaattacaattcaagatgagatttgggtggggacacaccaatcaacaaactccacatagaataaactgaaagagatacacattgaaatacattacaatcaaactgttgaaagacaagcacaaattctcttaaaagcaacaagagggaagcaacttatcatgtacaaaggatactcgatctcacttttgcccaggctggagtgcagtggcatgatcatgactcactgtatccttgacctcctgggctcaagcaatcctccaacctcagcctcctgagtagttgggactacaggtgcatgccaccatgcctggctaatttttaaattattattattatttctgcagagatgagtttcagtatgctgcccaggctggtcttgaactcctgagctcaagcaatcctcctgcctttgcctctcaaagtgctgggattacaggcatgggccaccatgcccacccaacaaccagtttctcattggaaaccataaaagccagaggtattaggttgctaaaagaaaaagattaactgtcaaccaagaattctatatctggcaaaacagtccttcaaaaatgaggcagaaattaagatattcccaggtaaacaaaatctgaaggagtttgttccctacaggagactctaaaatgggcctttcaaattgaagagaaagagcattcattagacagtaacacgaggccatagaaagaaacaaagatgtctggtaatgataactacacaagcaaatataggagccagtgttgctgtgcgtttggcttgtaaattcactttttcttacataatttaagagatgagtacataaaaattataagtgtatattactggacacacaatatataaggaggtaatctgtgacaagataaagggggaggagctgtataggattagatactttatatgccacttaagttaacttgcaataatttcaaactacattgttataggatgttaaatataattcccatggaaaccacaaggaagtatctttaaaaatatacataaggtcataaagagggaatcaaaaacatttattatgaaatatcagttaaacacaaaaaaggcagtagtggaggaaaagaataaaaaaggcataagatatacagaaaacaaataaaatggttgaagttctaccttatcagtaattacttaaaatgtaaatgaattaaactctccaataaacatgtggatattggcataatagatgaaaaccaagacccaatgatatgctgtctaaacaagacttgtttagatccaaagacacatataggttgaaagtgaaaggatgggaaatattatccaataaaaataatgaccaaacaagagctaaagtggctatactaatattggacttaaagttaaaaactattaaaagggccaggcctggtggctcatgcctgtaatcctagcactttgggaggccgaggcgagtggatcatgaggtcaggagttcgagaccatcttggccaacacggtgaaaccctgtttctaccaaaaatacaaaaattagctgggcgtggtggcatgtgcctgtaatcccagctactcgggaggctgaggcaggagaatcacttgaaccagggagtcagaggttgcagtgaaccgagatcacgccgttgtactccggcctggtgacagagtgagactctgtctcaagaaaaaaaaaattactattaaaaggagagacattatatactgataaaagggtcagcttatcaagaagatataacaattataaatatgtatgatctaacatgaccacttttgggtggggtttttcccagaatgcaaggttggtttaagatttaaaaaataaatgtaattcaccatattaagagaataaaggagaaaagccataggcagtgcctgtgttcattatggaggtgtaattgtactaagtaccctacagactgtcaaaactggtaatatgtgatgtctacatgatgggaagccaccatagtctggtggttaaatgtatgagctctggaatcagacaatcagggttcaaattccacccagtgtggaatgtgggccactagtacacatgtgacacaaggaaggttttatggcttaaatgctgtcttactaaatttgtaaaaataagtgaagataaactgcctgccaggaaagaatgtgttgtggtatccttgttgccacctcagaaagcctagcagccccctggagatgcttgggatagtcgcctgtcccgggtggccacagaaaaggtgcacccagctcctggaactgaagaagagctagggaagcccctggaggagctggtgttggagccttgacctacgagcctggaggagtggggaaaggtggtgagggtgaactggtgtcatctgcagcagttgtctgaaaggaacaggctgaggtaaatttgccctgtggcactgaggtgcctgcagacatggaagtgacagttatgtaggctcctggagttcagtcttggagagtcccaccttgccaccgagactgtctggtgccaaacacctgcaacccatgataggaatgccaagaagtactagagagtcctgctggggttcagcctctggacctcttgcccttcgatgtttttcctcatgcattttgctggcaatatgcccttagctggggcactttttctctgtcgcatgtcccgtgtgtcacatgcatcaagctgaacagtacctggtttgccatggaggtagcaggtagtgaggagacctctccaaatgtcatatcctccaaggacccggcagcgcacaaactgcccttcataggcaacttgcttagcaaggtttgcccccatcctgctcgcatgcctggccatgctatcatgcactcgttcaacctgacccagcgtgctcccccttctggctgggatcactccactttggctttttccctggtagttctaccaggatcctggtgtcatatacccctaaaggacagtatcccatcaggaaacctcagtgttcctctctggcgatcctaaggggactctctgaaaatgacattgctgtctgcttgtaccacaaagtggccactccagaatgacaaagatccctcctccaaggcacaaatggactctcctccctcgtcacctctaagacctgggacagccactcacacctccccccagatccttgcttaaaggagaccaagaagaagataccaggggcatgaaggaaatggatactgaaggaggaagatcctcagtgtgggagaagacgcagttagagaaaaggggcccctatagcagtgggagagtaccatcagcatctaggtccctagcaaccagcagtagcatcacatatttgggagcagtcctgaacccctgaagataagcctctattccaatcactcagaagacagctgaggttagattttacagatgtcttctatgagttcgttcacaaaagatcatgccatcaccagcccagatagtcctgcctgctagaggcttcctgcctcttcatggcagtgaaggaggtgcagcagcgctgtatggccagccacattctccttcctgctgccagagaaaggaagagcttgatgaaggccattatcaactcagctctccagccacattgaagtcaaagacagcaactcacagaggaaagctttcagatactctgtcaatgagaaattctccactcacatctgccagttgtagtctctgtaaacagaaattgtcagtgcccctgctgctgccattgctgcccccattgccactgttgtgagagtgaggagagctgcccccatctcctaccttccctgcatagttactgcagaagaccttagcttggagaaccctgaacacgaagggaacctcagggtgggagaataattctcaggtcccttcagacagcgtagcagctcagccttcctgttctccctacctgctgtggaggccacagatcctttgccattggtcaccttttccttgcagattccagaaactaccaaattagcagtcactgacttggctggcctgttaggccactcatactctctgaccctgtacctacacacacatcagatactgatcatgaaatgagatgcacagttcctgactctccttttgctcttcctgctatttctcactttggattccaacctatatttgctattccacttaataatgagaacaggggccctctgcattccagtccctcggtcatacttgcgggatcctctacttctgcctaacccacacgtcctagaactttctccctctccttaaagcttaccttctgcagaatggagtcatatacacctgtgcaggtggattctcctccccttttcttacagacccctcctcaagttgcttgcaccagtacccctgtctttaccagccaacccatcactgcttctgcagtcacttctagcatgccaggcagcctgtctgcagactggacttcccagcctgcctggactgtgttataattgatgtggatagtactcttccttccaagctttcttcttcaggtctccctcaagatccggggtgagcttcctcccattggaccaggcccatcccagtgtggagcggatatcccctgcaaaggccatcatccccaccagcccacctgcttttatggtcagcagccctacttgaacttctaagcttgcttttgattcaggaaacacttaccagctgaaatctgggggtcctgattcagggccttgccagagaaccactccccccagtgccctgtcttttctggcccacctaccactgattctgcagtcacctccactccagtatacaacccgtcttcagacttggtgtctccgcctgactttgcctctaaggaaatcaacatgggtaccatgcccatgtccccatctgttatcatcctgtctctccctgcaatgttaacagctgtttccctttgagaaacctgccagcccctgaaaacccttcacacttaacctctactgcagccctagaacccaatggcagcacaactcagttggcttttgggaactaaacactcccgtgtccactttggcatcaatgtcagcattcaggcagcccatggtggtgcctcgggtgttttacccattggtgtggacactcttactcttgccatgaaatgctaccagaaagcacaacactgaggactgttgctcatttcttgctgatgccaatccaagccaatttgtatttgtgggatctgaagcccttatggatagcaaaagctttggggtcattgggtctaccacgcagagtctaccaccacatctagatcgcttagctttggagcaaaatggctgggggacagccagtaccacagctcatgatgggggaggcttagacctgagcgccagggtcctgtcagccctgatgcactcctgctgcaattggagaagccggcactgctgagagcaaatcaaatctgccctgggaaacactttccttcccacctgtagttagagcacctggtgccagcccagccaaaacacgcctactactactggaagatttgtgatcactgagaaggagtgtttcagaagacatggctgttcccccttttgttcagatcacctgggacctgtttggccagagcacttgtgttccagtggaagggaccagcaccatacctgtgctgagatccttctcttcctgccccagtcaagccacctggggcacacctaactaaagtacacctgttgcagtctaagggaccagcactgcatctatgctcggatgcctttatgttcctacctatagccagaacacctgaatcccacctgtccagggcacgtgtgttgcaatggaaggggccaacatcatacctatttttagagagtcttctcttcctgcatatggtctaagtactggggcccacctggccagagcaaacctgctggagatacctgcaccactgagaagaaatgcatgccacgtgatatatctgttcattccttccatcagacacctagggcccacctgtgctgtttgaagggctggcatttcacctgtgattggagatgctactggcagaggacctggggtacacagtctggagcacaggtgatacactgggcggaggcagccccattcctgggctccagggtatttgtatgctcagcatcattgacagctgctggcgtggtcttgcccagggcacatctgttacagtctcccaggagaacaccatacatacacctttaggaagacacttctattcctgcactcactcacaatacctgggctctatctagacaaagtagccctctgacttggtgtagtgaacaccattgagaaaatacctggctatgggccagttttccattagtcttagactggcaggaccccttgctgcctatagatatcccgttttgtcttgcccatttgccttaacaagccccgttctttcttttccagattgctatacaaatatgatataacatagccttgttcttattcattaatcctctgtgctaagcttcagcacttttgctccatctttcagggcaaatgtacctccagcatgagcatggaagcagcagtctcgcttaggacacatttgtcacctgcccaggcttcctttggaggccaaagtttgggatcaccaactcattcattttcttctagtgaaagaaacaatatctcatcaactttaagcaaaagctatccagaagtagctgatagtggtgggggaccacagtttgccataaatggaccttgctccattaggaagaggctccacctcttctagttatgtcaaacaaacttaacctgccctctatcatcctaaagaaagctggcagcccaacccttcaggtgttttgtatatatgttaaagggtgtgggttcagatgagactggtcagaagtcaacacactggccttgaggcagtctactgtggaaagaagaaaaagatcagtaagtatatccaccacaccatacccagtttcaacttctcagtctggtagaaccaagctatgggccagttttcctgccatcttacgctggcaggaccccttgctgcctgtagctgcctcctttggtccagcccatttgcctcagtgggcccttttctttctttcctagactgataaacacacacacacatatatatatacacacacatatatgttatatgtgtatatatatatacacacacatataatgtatatgtatgtgtatatatatacatatatacatcacgtgtgtgtatatatatatatatagagagagagagagagaatgccttccttttgttcattgatcctctctgcttacatgtcttttctattttagtcaacggtggaagaagaattgacttctttctataagtggtgctgtgttgaggcagatgtaacttttcaaagttctatggctcagcaaataggaggtggcatagccacactttacaactgcacaggctgacatctgacatctctgtgttttgatgtaaaggatagcagccatgaggaagggaagctcaaaggaggaagggatgggtgaccctcccttgccttttccctctgtgctcctcttccatcactctgatttggtcgtacgccagaccacccccgatgtgtgttagggaaacaaaattaacaaatttggttgaaaataattaaatgtctcatttgtgtctttctctttcatttagacttaagaaaatcatccccacatattcacacctcgaccaaagaggatgggtatggtatagaggcccttatgtctagaagaaaaaaaggaagaaaaagctcatggctcctttgtgattattggaaattttaagactaggatgtcacatattatatagaagtgttttcatgctccatgaaaattcagaaaagatcattttttcaagaaaatacctagataaggtctatttggaaaagtaattggtctggctctagtataaaaccctaaaatagcaaattacagtccttaccattttatccaaatctagctggctgtggagtcctgctgtgtctccaatagacttaattcctgaaaatacaatctttcctaagataattcaaggttcaggagaaccagctgaagctgggggaaaaagaaaaatgtaagcatttcccttagcttagacatattattttactaaatacttattcagagttgattctacactagacattgtgcttgagcctagtgacatatagctgaaaggcatctattgcctcaaaggaatttacaatatagtaggagtgatgggtgaatatatcaaaagtaaaatcggaggggttactagtagggatatgggagcagtaggaacacaaaactaagaatatcatttcttcagaaactaacagaactagactaacagcaatgaacaaaaaaaaattgtaaatccttccctatcgataattactttaaatataaatagattaaatttctcaatcaaaagacacagagtagctggatggataaaaagaattacccaactatattctgtttacaggaaactcactttagatttaaggacatacattgtttgaaagtgaatgaatggaaaaagatattccatgcaaatagtaaccagaagtgagtcaggtggctacacttatattagacaaaatagactttaagtcaaaaactaccgtaagagacagcaaaggacattatataatgatacatgggttaattcatcaggaaaatataacaattataaatatatatgaaccaaacataagaacacctaaatatataaagcaaacattggcaggaataaagggagaaatagacactttataataataataggagacttcaattcctaactttctgtatggatagaacatgcagacagaagatcaattagtaaaatcaagacttaaacaacactgaagaccaaataggcctaacaggcatatacagaacatctcacccaatagcaacagaatacacatcattctcaagcccacataaaatattctcgggtatagatcaattataattttatctagatctgggtggctatagagtcctgccatgtctccagtagacttaattcctggaaaatacagtcttttctaagataattcacagtttaggagagccagctgaagctaaggaaaaagatcaaataacaaatttaagaagatcatatcaagtatcttttctgagctaagtggaatgaaactagaagtcaacaccagaaggaaaactggaaaattcacaaatacgtggaaattgaacactgaagaggagagtacacttccaaactcattttatgaggccagcattaccctgacaccaatgccaaagacagcacaagaagaaactattggccaatatccctgatgaacatagatgcgaaaatccttagcaaagtattagcaaattgaatttaacagcacattaaaataatcagacaccataatcaagtgggatttatccctgagatgcaaggagggatcaatatatgaaaatcaattaatgtgatttactgcattaacataatgaaggataaaaatcattttatgtggctctgaaacccaatggcagcacaactcagcttttggaaattggaatatgcaggaaaggcatttgatgaaatttgacaccctttcataaggaaaaatatctcaacaaattaggttacatggaatgtatctcaacacagtaaaggccaataggaaaaggccatagctaacatacagtcaacagtgaaaaactgaaagcttttcctctaaaattaagaacaaggcaaggattcctgctcttactacttctacttaacttactactggaagtcctggccagagcaattaaggaagtgaaataaataaaaggcatccaaattagaaagaaagatgtagtaaaattgtccatgtttgcagatgacatgatcgtacatatagagaattctaaagaatccataagaaacctgagaactcagcctgggcgtggtagctcacgcctgtaattccagcactttggaaggccgaggtgggcagacgatggggtcaggagtttgagaccatcctggccaacatggtgaaactgtctctactaaaaatacaaaaattagctgggtgtggtggcaggcgcctgtaatcccagctactcgggaggctgaggcaggagaatcgtttgaacccgggaggaggcagaggttgcagtgagccgagattgtgccattgcactccagcctgggagacagggcaagactctgtctcaaaacaaaacaggctgggcacggctcacccctgtaatcccagcactttgggaggccgaggcgggcagatcacaaggtcaaaagatcgagaccatcctggccaacatggtgaaatcctgtctctactaaaagtacaaaaaaattagctgggcatggtggtgtatgcctgtagtcccagctactcaggaggctgaggcaggagaatcgcttgaacctaggagggggaggttgcagtgagtggagatcgtgccactgcaccctagcctgggcgacagagtgaggctccatctcaaaaaaaaaaaaaaaaaaaaatactgttcaaaaaaggcagaattcaaaaaatgaaaaggtaaactataacaagaaaaaatatttgcaaaatatgtgtctaacaaaggactgctacaactcaataataaaatatcagtccattcgataaaaaattggcaaacatttagctatactgaccaagataaaaggagaaaagattcaaattaccaaaatcagaaatgaaagaggaaacattactatcaacattatagaaattaaaagaactataaaggaatactatgaacaattttatacctagaaataatataatttaggtgaaatgaacaaatccctagaatcacagaaactatgaaagctaacttgagaagaaataggataatctaataggcatacaacaagtgaggagtaattaattcataatcaaaaaaccacccacaaaaaattccaggtccaggccaggaggagtggttcacccctgtaatcccagcactgtgggaggccaagccacccagatcacttgaggtcaggagttcaagaccaacctggccagcatggtgaaacccatctctactaaaaatccaaaaacaaaaaaattagccaggtgtggtggtgcatgcctgtagtcccagctactcaggaggctgaggcaggagaattgcttgaacccaggatgtggaggctgcagtgatccaagatcactccactgcactgcactccggcctgggcaacagagcaagactccatctgaaaaaaaaaaaaaaattccaggtccagatggctctactgctgaattttgctaaacatttaacaaagaattaataccaattctttgtgaactgttcattttatggacagttaactcattttatgaagccagtattaccttgataccaaaacaagacaaagacatcataagaagagtaaagtacaggccaatatgattcttatgaatatggatgcaaaactctcagcagaatactagtaaacaaaacccagcaatatataaaaagaatgtatgctagcaatgcaaggttggtttaacatccaaaaataaactattgtaatacataatatcagtagaacaaaaaacaaatcatatggtcatttcaacacatgcagaagaaacatatgacaaaattcaacatcttttcataataataattttttaaattatttttattttttaatatagagatggggttttgccatgttgcccaggctgttctcaaactgctgaactcaagcaatctgctggccttggccttccaaaatgctaggattgcaggtgtgagccaccatgcctggccataataataattttttaaaaactcaacaaagtagtataaaaatgaacttcctcaacctgataagagcaagtacaaaaaacccacggcaaacatcataatgattaaatttggatgctttccctctaagtttacaaacaagattataggctgggcatagtggctcatgtctgtaatcctaccactttgggaggttgaggcagccagatcgcttgagcccaggagttcaagaccagcctaggtaacatggcaaaaccctgtctctacaaaaattacaaaaaaattagccaggcatggtggtgggcacctgtagtcccaactacttgggaggctgaggtgggaggatcacctgaacccaggaggtcaaggctgtggtaagctgtaatcgtgccactgcattccagcctgggtgacaaagtgagactctgtctcaaaaaaacaaacaaacaaaacaaaacaaaaaaacaagattataatgtctactctcatcacttttatttattattgtacttgagtctttagctagagaaatttgcagattagagttattttgtggggaatgtccaaaagaatccaatgaaaaatctattagaactaataaactagttcagcagtattataagatataaattaatatacaaaaatcaattgtatttctatacacttgcaatgaatcatccaaaactaaaattaagtaaacaatttcatttacagtaacatcataaagagtaaaacatttacgaataaatttaacaaaaacattttcaacatatactctgaaaactacaaaacattgtttaaagagagtcaaaaatatctacagaataggaaaaagaatgcacattcacgaataagaaggcttgatattgtttaagatgacaatattccccaaactgatctacagattcaaagcagtctctagcagaatcccagctgaccactttgtagaaagtgataaggtgattgtaaaattcatatggaattgcaaggaatcctaagtagccaaacattttgaaaaagaaaaacagccgggcgcagtggctcacgcctgtaattctagcactttgggaggccaaggcgggcagatcacctgaggtaaggagttcgagaccagcctgaccaacatggtgaaatcccgtctctactaaaaatacaaaaactaggccaggtatggtggctcgtgcctgtaatcccagcactttgggaggccaaggcgggcggatcacaagatcaagagatcgagaccatcctggctaacatggtgaaaccccgtctctattaaaaatataaaaattaggcaggcgtggtggcacatgcctataatcccagctactcgagagactgaggcaggagaattgcctgaaccagggagtcggaggttgcagtgagccaagatcatgccactgcactccagcctggtgacagagtgagactccatctcaaataaaaataaaaaataaaaaagaagaagaaagaaagcaagaaagaaagaaagaaggaaggaaggaaggaaggaaggaaggaaagaaggaaggaaggaaggagaaggaaagaaagaaagagaaaagaaagaaagaaagaaagaaagaaagaaagaaagaaagaaagaaagaaagaaagagaaaaaacaaagtaggagaactcacacttactgatttcaaaacttactgcaatggcaatggccaggcatggtggctcatgcctgtaatcccagcgctttgggaggccaaggtgggagcattgcttgaagctgggaggtcgaggctgcagtgagccatgctcatatcactgcactccagcctggatgacacagcaagaccctgtctcaaaaacaacaaaaacaaaacaaaagaaaacaagagttattgcaatgcaatagtaatcaagactgtgtggtattggcacaaggatagacatatagatcaataaaatagaattgtctacaattgcatgaaataaacccataaatcttgtttgattttttaattatttcaatcattttgttacatttctctgataaatttctgaattgcttttcggtattatcttggaaatcactgtgttgccttaaaattgctgttttgaattcctgatcatagagtttgcctattgtcatcttgctaggattggtcactggctccttactttgtccgtttggggaggtcatggttccctgtctgctgttgtttcttatggatctacatctatgtctttgcattgaaggatgtgttagttattccagctttctctgtctggtttgtttttgtttttcttagatatgtttgcttagagattctttgtagtttatctgttgagtatcttcttcactaggtcactctctcctttatggtgctaggtggcaccttaagcccaggtgtgtctttgctctagtgaacattttgagctttgcccatcctgaatgagggaggtccgaaaggggctaccctggcagggtgggaaggctgactaggggtttctgcccaggagaccctctcatttgagttctgggatattgctggtgattatctttgtgctggatatttgtttctgtttctgtggtgagagtgaagccagcttgcttctactctaccattttggacctagtacaagtacaaaacccatatatctttcgtcaactgattttttaacaaaggtgctaagaccattcaatgggggaaaagtaatctttcaacaaatagtgctggggcaactggatagtaacatgcaacagaataaagttggaccattgccttgctccatatacaaaaattaactcaaggtgaattgactacataaattaagagttaaaactataaaactcttagaagaaaacatatagaaaaagcttcatgacattgattttgggaatggtttcttagatgtggcagcaaataacaagcaaaagataaactagataaatgttttgccacatcaaaatgaataacttttgtgcttcaaaagatagcatcaagaaattgaaagtaaaacccatagaatgggaaaaaatatttgcaaatcatatacgtggtaagaggcttgtactcctaatgtataactcttacaactcaataataaaagataaaaacctatttaaaaataagcaaaggatacgaatagacatttctccaaagaagacataaaaatggtcaatttgcaaacaaaaagatggttagaaacattagtcattagagaaatgcaagtcaaaaccacaatgatgtgccatttcatacccactaggatggctagaatcaaaaagtcagataacaaaaagtgttggcaaaaacctggggaaattggaacctggaacctcaaacactgttggtgggaatgttgaacggtgtagccactttggaaaacaatctgtcagtttctcaaactatcaaaaagagttactgtattacctagtaattctacttcaaagcatgtacccaagataaatgaaagcaacccatgcccacacaaaaacttgtatatgagtgtttgcagcattattcataatggctaaaaggtagaaacaatccaaatgcccaggtgattaatgggtaaacaaaagcggtacatccatataatagaatgttatttggtcataaaaacacatattatttagccataaaaacacccatgctacaacatggatgaatcttgaaaacattatgccaagtgaaaaaagccagacacaaaagaccatatatcatacagttccatttatatgaaatgtccagaacaggggatccatagaaacagaaagcagatcagtggcttccaagggttgaaggatataggctcgtagctgaaaaatagagggttttcttgagatgataaaaggttctaaaatggactctggtaatggttgtacatatctataaatatactacaaaacactgaattatacactttgaatgagtaaattatatgaatatgtgaactatatctcaataaagtgtaaaaacaaaacaaaaattaccaatataatgaataaaaatgaggcatgaatgcagatctgaaagactattaaaagtacaaaaaggaactaaaaatatctttccaaaaagaaaactgcaggtctgaatgattttaatggttaattctatcaaacatataagaaagatgttttaccagcattaaacatactctttcagagaataaagaaagcaatttttcctaactcattctgtgtaactgacattaccctaatataaaaacctagcaagaaagggacacaatagattaataaacctcatgaacatagacataaaattcttttttttttttcttctcgttctgtcacccaggctgaagtgcagtggcacaatctcggctcactgcaacctctgcctgggaggttcaagcgattctcctgtctcagcctcccgagtagctggaactacaggcatgcaccaccacgcccggttaatttttgtatttttagtagagacagtgtttcac[131 bp omitted]aattaaattcaaccaaatagaaaagaatgacctagcatgaccaagtagggtttgtctcagatatgtaaggttggtctaacactcaaaatttaaaatgtaattcaccatattaagagaacaaacaaaaagtcatatgattatctcagctttggacaaagtaattgaaaaaaattttaattctggatatcaatcccttctcaaatatatgatttacaagtattttttccaattgcctgggttgtcttttcactctgttagatagtgtcttttgatgcacaaaactttttaacatgtatttttttgtggcctggcatatttgtttttgtagttatggcaagagttctgagattaattttaatacacctttgactccagacacaatagttcacaagcaatcattacttaatttataaaaacatcttttctatgacaacatgggtttcaagtaatagttttatttttctttccaacttttattttaggtttaggggagtacatatgcagatttgtgacatgggttgaaaaaatttaacacctctttgaaaaaatttctcagtatagaaagaattggagggaacagcctttacatgataaagcacatctataaaagccttaagttaatagcacactgagcactttccaccccccgatcaggagttggaaaaggttatctattgtctccacttgtattaaacattttactggagatcacagtaactgtaaaaggtaagaaaaataaaatcatacagattaaaaagaatatgcatagaaaacataattgtatatgtagaaaacactacccgatatacaaagaaactacaagagataagaaaggaatttactgaggtgccatataaaaaagcaattatttttgctgtatcctactacataccaatagacagatagatagacgtagatatatatgtgcatgtatatatacacatatatgtgagtatgtgcatatatatacatgcatatatatatatataaatgtctatctatatgtacacacacacatatacacaaaatgcataccatgatagtggactggaaaaagttaagtcatccacttaagatgacatttaagaaaggtaagtcatccatttcaaccaggaccctgaaagttgtccatgaaattattaccagagatattggtgtccatggggcataggcttttaagccaggatagatcctgcacccacctgatgtcatctcatgtccttgcacccaggaggagatgccacacacaactgtgtaggtagctgcaaagctcagtaagaaaagaaatgcccagttttgctgtgctgacaattgttggtctctgcaaacatagaaggtaagaaagagaaataaaaggcatgcaggtggaaagagaagtaaaactgactttattcatacatgatgcatggaaaatacatgtagaaaacccaaaggaatctgcaaaaaaaaaaaatctaccaaaaataaacaatgaatttagcaagatcccaataatataaggtgtgtgtgtatatatgtatgtgtgtatacaagtactatatatacatatatatttaatgcattttctgtgttctaccaatgaactatttgaaaataacatttgcaaatcccataacatacttagggataaattagcaaaagctgagtaagacctatacacagaaaactacaaaagagtagctgcaaactttctctgtaaagggtcagggagtaaataatataggttttataggtcacgtatgatctctgtcacatattctctggaattttctgttgtttttaaagaccttttaaagacgttaacatcattcttagctaaccggccttacaaaaacaggctatgagtggggcgtggtggctcacactcataatcccagcactttgggaggccaaagcaggtggatcatttgaggtgaggagttcgagaccagcctgaccaacatggtgaaacccgtctctgctttatacaaaaattagccgggcatggtggtgggcgcctgtaatctcagctactcagaaagctgaaacaggagaatcgcttgaacccgggggtgggtggaggttgcagtgagccaagatcgtgccactgcactccagcctgggtgacagagcgagactccctctcaaaaataaaaataaaacagactataggccacatttggcccatgggctgaaatttgctgacccttggtataaaacattgctgagaaaaaaaatgtaaaagattaaaatatatggagatatatcccgtgagatggattagaaaagttaatattgctaagttttccattttggccaaactctgaaatctgttctgtggaattattacaggagatcctggtcccttggggcacaaggattttaagccagggtgaatcttgcacccacctgatgtgccatctcctacgcttgctgaggcagctgtgtggttggctgctggggtccatttgaagagaaaggccctgtgggatatgctaacaagtggaactccctgccctacatcgtctgaggaaactggaacccagccaaagaagaccttccagtaggcagtgcctgtgatcactgtaggtgtgcatggtgctcagtaccctacaggctataaaaaatagtaatgcacgatgcacacatgataaggaggcatcacagtacaggtggttaaattcaggaactctggaatccgagagcctgggtcaaatcctgacagggccactaccacctgtgtgagccaaggaagcttctaaagttttacaaatgctgtttcaccaaatttgcaaaatgaagagaacctgcctgcctggtagagatattgtggaaagcagcatccaggaaggtctgagcacctggtccccaagtcagaaaccttcacagcccagatggggatgccctaagttcatacccttctaggcgaccacagagaagtcccgcctggctccaggactcggaaaagcgctagagagcttcctggaggaggcggcatcctcccatgctacctgcatagagaagagagaagggaaactgggtcctctgtggcggctgcctgaaaggaagcagctgggggctcttgctccctgcctgtgctggtgtcttctccccaccttagcccaggccggctgcagcggcggggctgcctgggcggagtcaggagacagcaccgcccggcccctccccaggcaccttccctgtgagccagctccctaccctgggaggatctggggagttcctgcctctggctttgggcaaggtctgcctccagagtccccagctgcaagggccggcgcacccacgcgcactggttgccaaatctcccgctttcaggccaggtgcggagcgcgcctcgacagtcctgaacattctccacttaacggctgagagccgctgggagcctaacgcctgcaaccgagtgagctcgagtccggctggggtcggaccgttggacctccccgttggccctttgttgtacttcttcgcgccctgggctcgcgcaagctttctctgccacgcgttccaacggccgctcaccggcatcgggctgaacacggtgcgcttcacctcggagttcccactccactccaaggatccaacagcgcacaagctgctcttcacgggcaactacctctgcaagcttcacccccggccccgccacgccccgcagggttccctgtctggtctggatcacctcgctctccctgcgcctctctccttggcctagctagacaagtgcttctcacgatccagcgcgtttaccgctcggtttcgtcgccgctaaggggtggtggtgtctgatccgtcaggctctgcgcttctctctcggatccatcctcaatgtccaggcaggactctcacatgaagccggtgctgtctgctgttcactctaagatgtccagccactcaggacagttacgatctgtcatccagggcccaaaccgactctcctctattgctatctgaggtaggcagtctcctctgtgaggtcggtcccatccatactgcctagatccctgcgcaggaagactgagatgaggaccctaggagacagcagccagggatagcgaaggtggaggatgagtataaatagcgaccccagcgcgatcagagaagctcccttacccccacccatcgcagtgggagtgagtcttcagatctacccccaagacaacgaaatcctacccgggccattgaagggaaacctccactccaacccccagaagacgccttagatgagaaagtgaagagatattgtatgagctcattcatcaaaggccatgccatcaccagctcaggcagtgctgctaggggattcctgcctctctggaggtccagttctctctgaagacagagaagatgcagggaggaagggtttcaaacaggaactctcaacccacgtctgccagttgtagactctgtaaacaaagttccaactcgcccgctgctgccactgccgctgctattttttgaggtcaaggtgagctgcccaaactctcctaagcttttttgtatagtcgttggagaagatgtaggcttgaagaagaaagcagagccccagtctaaccacatgttcttagaagataaagccaaggccccttcagatagcagtgcagtgcccctcagcctgccccttctttcttcctgcttgttgcagagatggcaggcaccccacccttggccattttcaccttgtagtttgctgatactaccatgttaccagccactgacttggctgtcctgtcttccaggcccccagtcccttctgcccctgtaccagtcctcaccccatatacagatcattaaatgaaatgcccatatcctaactctcctttttttttttttcctattcttgttgtttctccccttaggttcaatatcattttgggagttcccctttatgggaataaaagccatttccatttcagtccctcatctgcagatttttttggggggtggtggggcagggtcctgctctgtcacccaggttgtaacgtagtggtgcaatcatggctcactgccgcctaaaactcctgggctcaagcaatcctcccacctcggcctccagagcagctaggactacaggcatttttttcttctagagatggagtcttgctatgttgcccaggctggtctggaactcctgcttttgagtgatccttctgcatcagcctctcaaaagtgctgggattacagatgtaagccaccatacccagcccagatctctacttttttttttttttttttttttgagacggagtctcgcactgtcaccaggctggagtgcagtggtgcgaacttggctcactgcaacctccacctcccgggttcaagtgattctcctgcctcagcctccagagcagctgggactacaggcatgtgccaccatgcccagctaatttttgtatttttagtagagacgaggcttcaccatgttggccaggatggtctctatctcctgacctcgttatctgcctgcctcggcctcccaaagtgctgagattacaggtgtgagccaccacgcctggcctagatctctacttttgacctcaccacatctcctaaccccttggcctttgcttcaagtctacctcctgcagaattgagtcatctatcagtttagtaatctaatcagaatctatctagtcatctaatcagaattgagtcattgtggatttttctccctttttcttacagactcttccacctgtatgcccatcttcatagaccggcccatcactggtgcctcaagcattttcactatcacagccagtaatctgcagactcaacctcaagcctactttgtactttggtataaactgcatggataccaatcccttttcacaggttttcatctcctggtctcccataggatccaggatgagtatcctcccatttgaccagttccatcccagtatggagcagatatcccttgtaaagaacacagtctccaccagcccacctgcttttatggtcaacagccctacctgaatttccaacattgccttttgacccaagaaacacctatcacctgaaatctagggttccagacaggcatcaacaggaaaccactctcttcaatgccctgtcttttctggcccacctaccactgcttctgcagtcacctccactatagtaagcagaccctcttcagacttggcatccaagcctgccttttactctgatgaaatcaacatggataccatgcccatttccccatctgttatcttcctgtctctccctgcaatgttaacagctgtttccctttgaagaacctggcagcccccagaaatccttcctacttaacctctactgcagccctggaacccaatgacagcaccactcaggcagcttttgggaatttgactcccccatgtccacctttggcatctgctatggtttgaatgtgtcaaccaaatttcgtgtattaaaaactcaatccccaaattcatatgtaaatatgtttgaaggtgggggcctttgggaggtaatgaggattagataaagtcatcagggtggacccctatgatgggactggtaaaaggaagagacacctgagctgacaggctcttgctcttgccatgtgatgtgctccaccatgtaacgacatagcaagaaggtcttcaccagatgccagcactgtgctcttgatttgctatcagagaggatagtgccatacctctggttggagacagatgacttcaatacaaagcttatgacctcagtcagagtgcctggggttcaactgggtgtagcacatctgttgcaggtgcaaatgtgtgtttaaaagtccctgtattcctgtctcccaatcagagcagtaagggctcacctggacaaagaacagggctataatgggtggagaccacaccatacctgtgtttgtatatatgtctctttctacaatgattgagatagttctgaccggaccatatttgttgtaatcagagggtataacagcatataatattagggagccactcctattcttgccttcagtcagaatacccagagtccatccattcagagtagcacctttgacttttttttttttttttttttgagatggagtcttgctctgtttcccaggctggagtgcagtggcatgatcttggctcactgcaacctccacctcccaggttcaagcaattctccctgcctcagcttcctgagtagctggtattacaggtgaccaccatcatacctggctaatttttgtatttttagtacaaacaaggtttcaccatgttggccaggctggtcttgaactcctgacctcaggtgatccgcccacctcagcctcccaaagtgctgggattacagacgtgagccactgtgctcagccccctttcagaaccatcgagaaaatacatgtgcttggaagcatttgtgttcctagctttggttacagcaatttcctttctggtgtggacatggcaagcaacagtcttgcttttggggcactttttttgcatggtcagggctcactagagacagagatttggggtgaccaattgatttattttatttggtgaaagaatgaggatctcatcaactaaggagcaaaagcttcctctagaagcaaagagaggccactatcagtcatgaatagaccttacactttgggatggaggctcagtcccacctagagatgtcaaacaaaccaaacctgctctctgtcctgctaaacaaggtggaagcccacacattgtgaggcagatgagaccagtcagaagtcaacacagtggtatcaagcagttccactgtgaggagtagagaaaactatttaggtatcattgtcatgcatccctggctttgactgtcagcctgccagacctaacccctggcccaatgttcctgtcttgaaactagaaggatgctcagtgctacctgcagctgtctcatttcccatcacccatttgccttggtgggccctcacctttctttcctagattatatataagatgggatgacgtatcctttcctcctccctctgtgcttctcccccaaccatctgacctcaatgtaggccagatatcctggacatgtgttagatgacacttgacaattttatcctttcaaaatgcttaactggccgaggggtggtggctcaaacctgtaatcccagccctttcggaggccaaggtgggtggatcacctgaggtcaggagttcaagaccagcccgggcaacatggtaaaaccccatctctactaaaaatttaaaaattagtcaggagaggtggtgcatgcctgtagttctagctattcaggaggctgaggtaggagaatcacttgaacccaagaggtggaggttgcagtgagccaagattgcaccactgcactccagactgggtgacagaatgagactctgtctcgaaaaaactaaaaatgcttaaacatctgaagtgtctctttcactttgacctaggtcaatcatcccaaacattcatacttcaaccagagagagtggatttggtatccaggctcttgggcctgtagaaaaaaaggaactaaaagctcgtacctactctgtaattactgaaaatgttaagcctaggtgagcatatttttccatttcatctaggagaatatgtatatacacatatatatgacagatatgcacaaatatcctgtttttagaagctgttagcatgctgctttaaaaaaaaaaataaagttatttggccgggcttggtggctcacgcctgcaatcccagcagtttgggaggctgaggtggtcagatcatgaggtcaggagattgagaccatactggccaacatggtgaaaccccgtctctactaaaaatacaaaaattagcctggcatggtgacacatgcctgtagtcctagctacttgggaggctgaggcaggaaaatcccttgaacccaggaggcggaggttgcagtgagccgagatcacgtcactgcactccgcctggcgacaaaacaagacttgcatctcaaaaaaaaaaaaaaaaaaaaaaaaattcaaggaaatgcccagatgagacctatttggaaaactaactagtctggctgtactctaaacccctaaaatattaccccacaagtgctacaatttcatccagatctggctgatggtagagcagttctcatctctctagacttatgtgctgaagtaaaatatttgcatatgccaggagaaccatcagaagctagtgaaagtgacgcatacaagcatttcctcagctccttacatattagtttataaaacagttatgattctacatgagagtctttctcaggccttactcatattgagttgaaagacatctcttagccgggcacagtgactcatacctataaccctagcactttgggaggctgaggcaggaggatcacttgacgtcaggagctggagactagcctaggaaacatagtaagaccccatctctacaaaattaaaaaaattaactgggcttggtggcatgcacctgtagtcccagacactcgagaggctagagcaggaggatcacttgagaccaggaagtcaaggctgcagtgagccgtgattgcaccaatgcactccaatttgggtgacagagtcaaaccccgtctcaaataaaaaaaaaaaaagaagaagaagaagaagaagaagacatctttcagcccagcagaatctacaatgcagagtgggagataaatgaataaccagaaattgccaactggaaagaatggtgatagggataagggagcaggaaaggaaggaggacataaaactaagtctgggggagataaaacatgaattgtgccttaaagaaggaagaacagccaactaggtggagaagggctatttccaaggtcaagaaaatagcatgtgaagaggcaggggagaaagagagccagtgggacaccaggaagatagtcaggtatgcatagaaacagaaaccaaagtggaagatgtggctgcggcatttggcaaggacacattttgacaaatatatatacaatgatgggacatttgttcattatcctgagcatatagggagtcaccaaaagattgggaacaaaaaaaaagtggcacaattctatgtacacttgagaaatatactgtggctacctgagagggagattagatgggtgtcactccaggggtgaggggcctaagggactccttgccatgactaaagcaaagtgagacaatggctaaagctgtgactaaagcaaaggtgaggacctgacagtggggatggcgaggaggaaacagaagagaaagtggagtaggtgacagcaaggccagggctattctagccatctggcttggacaaatggacatgactcatttggacaaacatatagtgagttcagtttttagttgtgaagtccaggtactactcagaaggctattggttcatttatcaatttaacatacttattgagtatcaaggatgtacttgggacaatttcaagtagcatcaattgcaaaaaaggtaaattcctgccttattggtgcctctatcttaatggggggcggggggagaacatgaacaacacacataaaaaatatgtgcattattttgtagattagctagttaacgagtgctatagagaataaagcagtttgtgggaaactaaatttgggagtagggagaatcatgggtttctgtttttacacaggatgcgcaggatgggccctgctaggaaggtgaaatttaagcaaaatcaagaagcaggcagttgagggaaccacgcagatatctgagggaagaacaacccagagagtgggaatagccactgcaaaggtccacaggaaggctgcccggggtcccagggagtagatattaaagacaatggagatagcatggagtcaagcatgagagcaagaggagagcgcagaggacagggcacagtctatgaaggccttgttagaagtcataagaaaggggcctttaacttagagatgggaatgattggaggatggcctggccaacttaggttttttttttttaattttaatttttattctaagttccatgtacatgtgcaggtttgttacataggtaaacatgtgccatagtggtttgctgcacctgtcaacccatcacctaggtattaagcccagcatgcattacctatttttcctaatgctctccctccccctaccccactccccaacaagccccagtgtgtgttgttcccctccatgtatccatgtgttctcattgttcagctcccacttacaagtgagaacatgtggtgttcctgagttagtttgctggggataatggcttccagctccatccatgtccctgaaaaggacatgttctcattcctttttatagctgcatagtattccatggtatatatgtaccacattttctttatccagtctaccactgatgggcatttgggttgattccatgtctttgctaatgtgaatagtgcttcagtgaacatacacatgcgtgtatctttgtaacaggatgatttatattcctttgcatatataattgctgggtcaaatggtatttctggttctagatctttgaagaattgccacaccatcttccacaatggttgaactagtttacatgcccacaaaccgtgtaaaatattcctgtttctctgcaacccctctagcatctgttgactttttaataatagccattctgacagcattgttctgtagctgggcaggagcatggaagccaggagaacaccaagaggcgaaggctgtggtcagggcaagggacagtgatggctcagatttggcaatagtgatggaacattacctctggcctgtctctatttcctttccatctgctgctcccactaggttcatgttgctgtgcttagagttcaacagagaagccatccagtctgggcttttctttgtgtggggtttctgaaaactgactcagtctcttaaagtttattcagattttctatttcttcttgagtcagttttggtagcttgtgtgtttccaagacttgttcatttcatctaggagaaaaacatacacacacacacacacacacacacacacacacacacacacacgacatatatgtatatatatcctgggtttttttatatgaccattttttacatagaaatgtgtattcttccctttctgtgtcagtaacaaacaaaagatatactaagaatttgagtacactaaagagtttcagatatggatgaaagacaccaagaataggaagaatgaatctgctccctgggttgcacacgataatcaggtaggagcaggaaggtcacaacaaccttgaagaataatgaattagccttgacagaacaaggggttgcataacatttttaaagtagaaaaaacattaagcattttattgttaatatttttaaattttttattattattactatttaataataaagcaatgttttattattaaagaaaat[131 bp omitted]agcaagaccctgtctctacaaaaaaaatttaaaaattagccaggtgtggcggcacatacctgtggtattagctactcaggaggctgaggcaggaggatcgcttgagcccaagagatagaggctgcagtgagctgtgattgcactactgcactccagcctaggcaacacagtgagaccccgtctctaaataaataaacaatcttataagtataaaaatattaaaaggtctagctgggcatggtggcacacgcctatagtcccagctacttggaaggcagaggtgggaggatcatttgagcccaggagtttgagtgtgaactgtaatcacaccactggactccagcctgggcaacaaaagtgaaactctatctcaaaaaaaataataataatgataacaataataataaaattaaaagatttatcaattaataagttgagcatcatttaaggacatggaaatcctgcatggcctctgtggtactgtttttcaatccatcatttgatttcatttgcatcctgttttgtgagatttttcctatatgtatatcaacactcagtttgggaaaatacatttatcctacatttcagagagtatatgtcaacttgcaaacactccctctccttattcatatctactgaccaacttctaaaaataaaaataaaactgaaatcacagataatgtagacagaaaaatgaaaagacagaaggccaagacagaaagatgaagctgggtgtggtggatcactcctgtaatcccagcattttggaaggcttaggtgggctgatcacttgaggtcaggagctcaagaccagcctggccaacatggcgaaaccccatatctactgaaaatacaaaaaaaatagccacatgtggtggcgggcacctgcagtcccagctactcaggaggctaaggcaggagaatcacttgaacctgggaggctgaggttgcagtgagctgagatcgcagcactgcactgcagcctgggcaacagagcaagacgaaagaaaagagaagaaaagaaaaaagaaaagaaggaaggaagggagggaaaggaaggaaggaaagaaggaaggaagggaaggaaagaaaaagagagagagatagggagggagggaggggaaatgtgttattttgagaagaggaaatggatggagaaaaaatggaaatggcatccctgtagagaactggccactctgcagaggcatgcaggggaagcgccactccacactgtgttctgggctacttcagcacctcttggggtgattctgaggacccagatcctgtcctcaggtatggagacatatcccaccatgctctctggggaccctttgagtgtgttcttcagaacagggaaagagagcattgtgaaggtggtgctaacatgttccagaggggaaagaacaagtggctgaccttcacagaaagcagcagaacctccagcctgactagttgtgtggggaagagctgtccagagcagtctctaagaagcctagtgagcatgggtgcctgcaagggtcttcatggaacagaacaggctgactccaagtttgtatctttgcagctgaaaggtgctatgtgagctccattggttgttcccaaagactacttctaggagcacttcaaggactggccatgtgccctgccattttagcaggactcaccacaaggaatgtccttggaggtaaggagaagaatatttgccgacaccctgccatgatcagaaacttcctctaaaatattgagaaatattttcactttcataagcaaactacaaatagactacttctatgtatcatgtcatagaagcccagatgctagaaatgagacatttgcttggagtacccatacctttaggatatgctgggttagtggtcctaattccaaaagaggccactgttgactgggacacagcaggatccttttgaactagctagcagtcatggctgctccccctggggactttggaagagctgctccatgaacatgcccaggaaagtggctctgtgcagcaccaggggtggagtgtggtggccatggaagtgctcctttggaactcccttcatgagacctgttggggcgcaggcacagctgatggacagcttccaggagctgtgctttagatccaccacagtgtttattccaggcctcccttcccctaggctcctcccatctaatgaccatgtacaacaaaggtacaagggcgcaggcaacaagaatctggcctttcctgcccaatgtgataatcctctacagggtttgtgtggctccaggactccctactggcctggtcaaaaacttatcagaagtgtgctgagatgtgactcatttgctacctagtccttccttctttcactgctttcacaggtagaggaaaaactctctccaaccgtgtttttcctctgcactcacaccaccaccacaatcatcaacacagaataagccttctgtgaccaaatgtgggggctttccccacacaccaggaagtggacaccagttaggtgtcttccaattcaattccaacgctacctacctggagatagctccatatcccacagctggtgggctcagtccccaagactgccccctccatacccttagacaccaatcacaagtccagtcctccaaaacttctaaccaacagacttcaagttacagttcccacagccccctctttgggtttgattaatttgctggagcagctcacagaactcagggaagcacttatttacatttactattatactttattataaagggcattacaaaggacacagatgaagagatggtatgggggaaggagcacagagctaccatgccctccccatgcataccatcctccaggaacccccatgtgttcagctatctgaaagctcaccaaagccaatcctcttgggttcttattgaagcattccttcccccagcgtatgaggcaggaccttctcaagggagggtcttaagacccacaatcagaaaggcaggggaatgtttgaaatgcttgtttcctggtgccataaagaaatagcacttgaacgtaaatttaattttctcagcaaggccatttttatgctttctgcagaaagggtacactcgccattagttctgccatgagagtacaccaaacaaaggagacagggtcatttataacctgatgcatccaccctactgctgtgtccagtttccattggctggaatgggacctcatattctgtatttgtcctgactggctagcaacttagaactttttaaaagaggcaaaggcagatgagaacaaaggaaggaggatgtaacttgtggaatgctgagaaaggtaaaaacaccttcaaataaggaagaggaacaggctatgacctaatgcttgcttggaccagcataagcatgccagggcaaatatttaggctaaattgtgggagctaagaacataaagtacattgatttctttattatggttagcagatatttaagaatgttagcacaggtctttgaataaattttgcttctaagagaagttactatttattcctaattagacagggaagaaagtctttgaagagaaacctctactttacttttcacaggaagattacagtcatgccctggggcaggtgaaatgagggcaggagacagattctgtttcctgaggcctgcccttggggcccaacacacccaacattataacaaaagactgtaacaagagctacgagagttaagagccaggagccatggatgaaaaccaatatatataaaactgcctttgcaaaaattgtaagagaaaattctgaccaactccatcttgcctttaacctccaaactgtccttggtcattcctgggcataagtcagactaactttgggagacaatagctcttcccaaaaatgaaaccacccttgtaaaactaatgaaaggctaccaggttaggaaaatcagaggggcctgaattctactaaaatgtaggtgcagttaaacaattaccagccattattccagaggtcccaagatctccaacttccccagctcctcctatgttaattactatgttaatggtaattaacatcactattgtggaatctaagacaggccttttgagatatcttttcaggcttttgcatttctgacaatcagatggccccacccaacctgtgactcaaacagtcctgttgcccccacccagaagcagactcagtgcatgaggaccattttcgtcatccctatgattgcattccccaaccagtcggcagcacccattccctagttccctgcccaccaaagtatctttgaaaaaccccagcctccaaatttcagggagattgatgagtaataactccatgtccctcgtggcatggccagcctctcatcaaactttttctttactgcaaagccatggtctcagtggattgattttttctgtgcagtgggcaggaagaaccgatcaggtgaatatatatatatatatatatatatatatatatatatatatatatatatataaaataacacaacaggaatcccacaggtactgagttcttttttttttttttttgagacagagtttcactcttgtcatccaggctggagtgcagtggtatgatctcggctcactgcaacctctgcctcccaggttcaagcaattctcctgcctcagcctcccaagtagctgggattacaggcatgtgccaccatgcctggctaattttgtatttttagtagggatggggtttcaccatgttggccaggctggtcttgaactcctgccctcaggtgatctgccagtctcagcctcccaaaatgctgggattacaggcatgagctaccgcacccagccagggttctcaaagctctctctccacacttctagcttccctttatcctttgaaggtgctttgccccaacaattcccttgtaagtcttatcctattgttgtatcttctcttcaggggacacctgcactgacagaacatgttatatgttggtttggggcaaaatatgattgctagttgtcatgcttacacataatttgctgtcaccatatgaactggagaaaactccttccctatacctttaaaatgcttgtccacttccacttggaaactgaatggcaccaatgccaggctagtggttttagaaagtggctctccagatctaaaatgttttcatggataaaccccctgtgtccttgtattcccctactagctttttaaactcttctgatttccaccaaatagaagttgcatatggaaatatgcagttagatgggccacctgactccaattgcagccctcagtccaccatctgaaaaagctcaggagatctcagaattctcctagtctaaactgacccttttattataattattttttcttgagatagggtctcactctgtcacccaggctgttagatcaatgcttcaaaacatagcttcctctgaatctgcagtacaaaagatgttctgctatgtctatttctgatagcctcttcctatactgatactttctttactagcatatatagattgcttgctttaacaattcaaccgaatatttgataacatcaaattaatttaactctatcacaggttgggtttgcaggcaagcagacattgagatggaggttatcacacagggcaattatttggaatggctcttggcctcagtacctggggaaggtggaggaagtaaacaggattgggcagagggagtagacatgttatgcattcacaacaaaggcctcagccaatcccacaggaagctctgtatctgtaaaagaccttcaatgtggtcccaagttgggagggaaccctagcttttatgctgtcacattaactagtcaatgaatgtgggcatcctcctgccaaaagggcattgttctgaccacttcttcatggaacatcttcctgtgtctccaaattgtggggaaaagaaagagagatcagactgttactgtgtctatgtagaaagaagtagacataagagactccattttgttctgtactaagaaaaaccgttctgccttgagatgctgttaatctgtaaccctacccccaaccctgtgcttgcagagacatgtgctatgttgactcaaggtttaatggatttagggctatgcaggatgtgctttgttaaacaagtgcctgaaggcagtatgcttgttaaaagtcatcaccactctctaatctcaagtacccagggacacaatacactgcgaaaggccacagggacctctgcctaggaaagccaggtattgtccaaagtttctccccatgtgatagtctgagatatggcctcgtgggaagggaaagacctgaccatcccccagcccaacacccgtaaagggtctgtgctgaggaggattagtaaaagaggaaggcctctttgcagttaagataagaggaaggcacctgtctcctgctcgtccctgggcaatggaatgtgtcagtgtaaaacccgattgtatgttccatctactgagataggagaaaaccgccttaaggctggaggtgagacatgctggcggcaatactgctctttaatgcaccagatatgtttatgtatgtgcacatcaaagcacagcaccttttctaaccttgtttaggacacagagacatttgttcacatgttttcctgctcaccctttccccactattaccttattgtcctgccacattcccctctccaagatggtagagataatgatcaataaatactgagggaactcagagactggtgccggcacgggtcctccctatgctgagcgccggtcccctgggcccacttttctttctctatactttgtctctgtgtctctttcttttctcagtctcttgtcccacccgatgagaaacacccacacccagctttaaaatttctccttttgtactctttccctttatttctcagaccggccaacacttagggaaaatagaaaagaacctacgtgaaatatcgggctgaatttcccccgatacaaatcacttattccctcgcctcctttaaatatttgcttaagtatcatttccctatgagagcaaccctaccccctccattccctactggagtccctcctactccacaggcttctcatcactgggttctgctcctcctgtttcctttcctattgcacttttcaccttataagtcactacgtaacttataacataagtttttttttttttttttttttaattgatcattcttgcttgtttctcatagagggggatttggcagggtcacaggacaatagtggagggaaggtcagcagacaaacaagtgaacaaaggtctctggttttcctaggcagaggaccctgcggccttccgcagtgtttgtgtccctgggtacttgagattagggagtggtgatgactcttaacaagcatgctgccttcaagcatctgtttaacaaagcacatcttgcactgcccttaatccattcaaccctgagtggacacagcacatgtttcagagagcacagggttgggggtaaggtcacagatcaacaggatcccaaggcagaagaatttctcttagtacagaacaaaatgaaaagtctcccatatctacgtctttctacacagacacggcaaccatccgatttctcaatcttttccccacctttcccctctctctattccacaaaaccgccattgtcatcatggcccgttctcagtgagctgttgggtacacctcccagacggggtggtggccgggcagaggagctccttacttcccagtaggggcggccgggcagaggcgcccctcacctcccggatggggcggctggccgggcagggggctgacccccccacctccctcccggacggggcggctggccgggcgggggactgaccccccccacctccctcccggacggggtggctgccaggcggagacgctcctcacttcccagacggggtggctgccgggcggaggggctcctcacttctcagacggggcggctgccgggcggaggggctcctcacttttcagacggggcggttgccaggcagagggtctcctcacttctcagacggggcggccgggcagagacgctcctcacatcccggacggggcggcagggcagaggcgctccccacatctcagacgatgggcagccgggcagagacactcctcacttcctagatgggatggcggccgggaagaggcgctcctcacttcctagatgggatggcggccgggcagagacgctcctcactttccagactgggcagccgggcagaggggctcctcacatcccagatgatgggcggccgggcagaggggctcctcacatcccagacgatgggcggccaggcagagacgctcctcacttcccagacggggtggcggccgggcagaggctgcaatctcggcactttgggaggccaaggcaggtggctgggaggtggaggttgtagcgagccgagatcacgccactgcactccagcctgggcaccattgagcactgagtgaacgagactccgtctgcaatcccggcacctcgggaggccgaggctggcggatcactcgcggttaggagctggagaccagcccagccaacacagcgaaaccccgtctccaccaaaaaaatacgaaaaccagtcaggcatggcggcacgcacctgcaatcgcaggcactcggcaggctgaggcaggagaatcaggcagggaggttgcagtgagccgagatggcagcagtacagtccagcttcggctcggcatcagagggagaccgtggaaagagagggagagggagacgggagagggagagggagaccttctgaggactgtcaacataagttataacataacatatataacataacttgttatgttatattgtatataacataacttataacataacttatagcataagttacatatatgtaacataggttacataacttataacaccttataagtcactatgtaacttataacatttcctttattatttattgtctgcttctctcaattcaaattaaggtagataaatttctttgttcacacatctagaaatgcatctgcaacagggcgggtgctcagttagtatttgttaaaacacacaggaaccatggctttacacctgtttactctctctaaatcaaccctcaatgattcctttccctccacatttatgattgttcaatgttatcaggaagagaaataaatcataatttgaagaaacaaaaatttaatggtagccacaattatagtagaaccattacctcaactgaattcctcacatctcagaactcaggattctgtacttacctcccactgggacgtatcttttccaggcatcacagataattttcttctccagctatcttatgattctttttgtataatttcattaatcaacattaacagccttctaggaattgctcacttcacaaatgttttttggaggtaatctcagttccctatgaagactctgtctctgcacttccagatgagaggaaaatcactcccagaaagagatgagacaatggaatcccaagcctttatctcagcgttcggatgacctctcttgacaaatgcacaagataatacaactgcggccactatcctagttggaaacacaatttggtaagtggttattcttttcagataaacgtatggaacttagacgaaatatatttcaggaaatgcagtgagaaacattataagggggaaagttctgctctcctagattagaacatcactgacagtggccagagaaagtttcctgagggatcagggactgtcattttccactggatgctcagattccagctgtagggtttgtgagtatccttcctccctcttccatgagacagcctcatctgaaatctccaatttacctctgacgattaaacacctagaccctcactatagtcacacaagtcttcactcaaaacacaagggcatagcagtaagattgcgatccttagctgtcatctatggagtgatcacttttgaggggcactttttgaataaatcatttcaaaatcatttcaaaaattttctcaaaaaaaaaaccctatgatttaaaaatttctttgacattctaagtattctactaatctattttatttctacccaccatggaacccacatttccctctgcaaaatacaaatttctattgtattcacccctcacccctgaacataaatttatcctcccaaacaaatttctgcccagatgacattttgacggctatttacacatccccatctcagagagcacattgtacataatttggcccttaatgcagcctctatgaaaagtcctttaatcaggggactagatgagtccttatttgtcttgaatgtctctagttcctccaggacagaagtgatcagtgaccacagccagttcaggaatcacaggatattgcaaatttgtctccgattgacatgaattgggtggattctcactccaggtctatcaccttcttatttgttaatgaaatatttgtcttcagacattgtaatagatacccaatgagtttcagagggtttgaaaatgaacactttagacatgaatagcctatatggtgaacttacagaggcaaagcgactggtcaacaaacagctgctctaccaaaaaagcctggagttacaaagcagatgaacatttttgcagagctggaaactaattccaataaggctaaaaacttgctactgctggtagggaaaatcctaactattgacagtcaaatgcttttgatgcgaggctacttaggttgatgttgataagagaaaagttcccttgtccccctggcagggcgtgcgatgggggtgtggctcgcttcttcagtgtcccgctgctcaaacctccaggggagtatacagacgggcgggctgtggggctctgaccccatggcagtgtctaggggtgaatgtttatagctgaagccccagtgggcgtgttacaggatgctctttagctgtccgcaggcggcttatgttagtcaattcaattagatccctgcgttatcgcaaggacagagggctttcatatcccggggttcctgtcttggtgtaccagaagaatcagatcacacatgggcttggaggatgactgcagggttttgagtggaagtagctctcaacagttgggggagccagaagggaaatggttttcccctggaatcgggctgctccgcagcaccggctctccttggactgccccagccaaactccgcgtccttctggtgggtggcctgcccgcgtgccagcgtctgtcatgtcttcttccgccaacatgttcctctggatgtccagcggcttgtgtgtctgcttgctagggtctcagagtatttatagggacaggatgggggcgggaacaggatgggggcgtggcaggccagggtggtcttgggaaacgcaacatttgggcaggaaaacaaaaatgcctgccctcacctaggtcagttggcacagggccaggggtggagccctagccagggaccacaccctcctgtacccagcacctccctttcccccttccatatcatttaaagggaccccgcccttccctccccagcactccccttccccacctccttatcaatgtcatcaccctggactgactccaggaatcactgtaatgtgggcttaataagaacagagctcggctggccgcggtggctcaccctgtcatcccagcactttgggaggctgaggcgggtggatcgcttgagcccaggagttcgagactagcctgggcaagatggcaaaaccccatttctacaaaaaatatacaaaaattagccaggtgtagtggcgcgcccctgtagtctcagctactctggaggccgaggtgggagaatcacttgaacctgggaggcagaggttacagtaagccgagatagcgccactgcattccagtctgagcgacagagggagaccctgtctcaaaacaaaacaaaaacaaaacaaacaaaaagcggagctgacagtcaaggtgaatttcacgtttgcctgtattcagttttagcattacataaaccaaaagaagaatgccataaaggctacaggcagctaatacagagaggtgttactggaaaaggaaccagaaagagtaaatatctcctaaacgtatgatgggacagaaagataaatgcctattacatatagttaatatctgtttgattagccttatttacattctccttttaaaaggtcttacatttagcatcttagatagaacccacaaaatttaaatatttaatagaaacttaaaattcctgtatcagaggacagaaatatatttttctcacacgtgattagtctaattgccactattaatcctattaatattctgttaaataatagcatttctgtagcgaaaagcaaacagtacggaaagataatttcaaacacctagttttcatatttttgtgttaaagtaataacatattttggtatagattatcattttttgtttgtttttgtttttgctttttctgacctggtgtgttaatgccctgggttggccctctaagaagctggccacctacttcgggcctcaggtgtcagacgccccagcttcgaggtctatggctcccagcaactcgagcgcctgcgcctgcgcattctcagccggacgggagcgcccagaagtctccgggcgccggtgggcggccttgtggactgcgccgggcatgctcggcggtgtgacggctcaggactgcatttcccagaggctgcagctatccggccaatgtagcctgaaactacatttctcagcggccactggaacgacctcaatctctgcctcctcgccagttcattgtggtcgttgacccggcagcgagctttggagttcatcgagggagaagtcagcgcccagctccgaggttggagcagccccgccgggcaacttgaatttctgcaaacgaacacagcaccgggagctctgcagacctgtgtcggcgcggaacccggactgagacatgcgtgagcgttgggtggaccgggcgaggatcccgggccggcgagtgcgggagcggcagggcagggagggtgcgtcggccggggccggtgtgcatccgcgaagactgggtgcatggcctccatgcgaacctgagctattaatatttgttactattttggataaaatcactgtaattgatttatgtaaaggagcaaaagactcttcaactctcagtttaaaaaggaaacgatagttatgataccttttgcatgcagcgggaagaaatgggattgccaggaagcctcttcttgtttggaaaaaactgtataaagtatttacaccttttaaagatgagagcaatgtcatctgaaaattatcagtgcagggaaaaggacttcaaaggatctgttgtgcagattacttaactaatgacaaaattatgtaagaaaggagagcaagatgacagctgtaaacatttccatcaatctccatattgcacagaaataggacccagctttttcttaaggttcttcaattttgcattatcccacagcagtagctctctctctctagctgctaggggacagaggaaattgaaatgtcagagaatcttttctgttggttttttatttgtttgtttttaaagaagagttgctcttaattttttagttagaattaaaagaaagcatgccagagaaacttacgttttaagtaaaaagtggaaacaggtcgggtgccatggctcatgcctgtaatcccagcactttgggaagctgaggcgggtggattgcctgagctcaggagttcgagaccaccaacatggcaacatggtgaaaccccgtctctactaaaaatataaaaattagccaggcatggtggcgtgcgcttgtagtcacagctacttgagaggcggaggtgggagaagtgcttgaagctgggaggcggcggaggttgcagtgagtggagatggcaccaccgcaatccagcctgggcgacagagcgagatcccttctctaaaaaaaaaaaaatatatatatatatatatatatatatatatatatagatagatagatagatagatacataaattaaattaagtggaaacaagtgtttaattaaaatgaaataaaggatgtataatgtttacgtaataactccaatgcagtagtgcccccttaatcggcagtttcactttcttcactttgttaccctcagtcaaccatgatctgaaaataggtgattttggtacaataagatattttgagagagaggggccatgttcacataacttttattacagtatgctattatagtt[136 bp omitted]caacatggtgaaaccctgtctctagtaaaaatacaaaaattagccaggcgtggtggtgggcacctgtaatcccagctacttgggaggctcccaggaggtggaggttgcagtgagccaagatcacaccactgcactccagcctgggcaacagagtgagaccctgtctcaaacaaacaaacaaacagaaaaataaaaatctcttatggtgcctaatttataaattaaacttaatcataggtgtgtatgtataagaaaaaacatagtatatatggggttccgtcagacatctactgaggatcttagagtgtatctc[144 bp omitted]gaaattccgtctctactaaaaatacaaaacttagctgggcgtgactatgcgcctgtagtcctagctactcgggagggaggcagaggcaggagaatcacttgaatctgggtggcgtaggttgccgtgagccaagatggcgccactgcactcactccagcctgggtgacagggcgagactccgtctcaaaaaataaaacaaaacaaaacaaaacaaaagagccaactcatgttaagcaagtattctattaacttttggggtgggttttcttattcttcaggacaaccacatgttggagctgatactcctattactattttagtgatgagaaaactgagccatattagtaactgcctgatcattttctcctatgttctctacctcccgtgtcttgaccaacctcagatttatactgtcaccattaaagaagctctggattgggtgatatggactctttcttaggcttagaacgtgggaatggagtgaggagaatctgttcaagagaagactgtgcaacccaatttgagacctagatcaacattcccaaaatgggggcctggtgggaaagcttgtgtctgattctgccttccttaagaagtgccacacctctgcgatcaactctgtacagcttagttaactggggcttgaattccactgttctccaaattttgtttgagggtgtttgtagcacagtttggaagctgaaatgaagggacaggaaggtttattaatgtatgtcattgagaacactaaagcctccttttctcctctctggattttctagcttttgaacttctcagatagaggaaccccagtgaagactgatcagttcttacaattctcaaagcatggcccatgtaagttggtgtttcttcttgaaatatggggatttttatattacgtggctattttccttaattgacctgaagcattcttcatcagaatgtaccatctaattgcctacttgattccttctgtttggcggaatgatgtcaaagtatcgtttcctccttacgaggtcctcatttctaatcggtgttcatgaattcattgagcaagttacgaagcaggtaaatagtaagtcttagctgaaaggctgtgatagagcagtggaggattgaagtcccgtggcagaagtatttgagcttcctacatccatctgtggtttgatgagtttgatctgttggcttcatctggccacacatcagaagatttgaagttttccacagagctgataagatggaattttgtattgattggtctcaatatgatgagataacatgctctatgaggcttttaagattgagtggggatgtgattatgatgtgaaacattgatatcatggttcttcttgggatgcctgagagtgatactaaggtcaattttgttatggaatgggacctgccagacttggacaacatgcatttggttctgagtcattttcaccctaatccactaactcaagaacagccaaatggccaggtgcagtggctcacacctgtaaacccaggaccttgggagccccaggtgggaggatcacttgagcccaggagttcaagaccagcctgggcagcatggcaagaccctgtctctaccaaaaaaaattttttttaattagccaggcatgggggcacatgcctgtagtcctaactacttgggaccctcagacagaaggacacttggagcccaggagttcaagattgcagtgagctatggtcatagcactgcactacagactgggcaacacagtgagactgtgtctcaaaaaaaaatttaaaaaaacagcagccaaagtattaagtgaaggatcttgtatgacactatcagcatattgttatcagtagtagatgaacagattaccagaactggggaaaactgaggcatttgttacagtcttcgtttataagtataaaatcattacttttttttttctttttttcttttttttttttttttgagactgagtctcgctctgtcacccaggctagagtacagtggcacaattttgactcactgcaacctccacctcctggattcaagtgattctgctgcctcagcttcccaagtagctgggattacaggcacatgccacaacgcccagctaatttttgtatttttagtagagatgagtttcaccgcataggccaggctggtctcgaactcctgacctcgtgtgatccacccacctcagcctcgcaaagttactaacctttaatacagatccacaagataacttttatgtcactttggaaaaaagtatttattaatataaggaaaaacacttatgatctgacataatgaacttgaagcttgaggagttattcaacaaatttgtgtcatggctattttctaagacagattttattctacagttggagaaaggaatcatagctattttcttcttaaagggaaagtaatatagagactaattgtttttgagaatttgtttcattggatacctagcaggccatatctttgtatgtactcttttacttaacagggaaactaggattcttttatccatttcaccacaaatctggagtattatgataatcctacaatatataggacattttgtccatagcagcaggattcttccagaacatgcagataccatgctcatccacttgccacatcataagcttccagcctatgtgattgttatgttattgctcccttactacactgaaacgttttattccctctcctttcaccttgaaagcattttctttgattttaccagaaatatgtgggtttgcagtatcacggatcagtgacatttgaggatgtggccatagccttctcccagcaggagtgggagagtctggactcttcccagaggggcttgtacagagatgtgatgttggagaactacaggaacttggtgtcaatgggtaagtgtacttctctcaaataattgagaatctgctccctgttatactttctcctttgcagattttagggctagcttaagaactgaacacgatttcttcttgttgccagagaaatgatttgagctttgttaggttggaaatgatccagtggcaggattagaattctggattgtctattgcaaaacattgacaaaagaggccaggttttctattatgtttttgctctaaattgctctaaatgctctgtgaaaatctgacccaccttgcaggcagaacagctagacaaagggtcttgatttgttctatctgaagacctatacaacttatatgccggcggattggataaacaaatcatttaaaactgaagttacctcattttatttcatataaaataatctgattttgtggttaaaattcatcatctctgaactttgcatttaagagtaaatgcaaattaaatctatatcctatagatatagatgtctaagcagactttgtttttgtcttagcaaaataacaataataatgttattaacacacagcgtgcttactgtgtgctgtttcactgttctctgctctttatattaatatacatttgtattaactgatttttaaccttacaagcactctataggtgctaaccattttaggtgagaatgctaaataaagcacagtgtgtttaagtgagttacgcaagatcacacagcccataggtgacggtagcagaaacttgaacccaggcacttaggttccacaatccgcgttctcaatcacaatgtcatactttctttttttttttttttttgagacatagtctcactctgttgcccaggctggagtgcagtgtaatgatctcagctcagcgcaacctccacctcccaggttcaagtgattctcctgcctcagcctccctagtagctgggattataagcgtacaccaccacacccagctaatttttgtatttttgatagaaacagggtttcaccatgttgaccaggctggtctcgaactcctgacctcaagtaatctgcccacctggcctccaaaagtgctgggattacaagcatgagccaccgggcctggttttttatcaagacacaaagaataaatgagtatacacttatctatatttataatagttagatagatagatagatttcatttaaaataaaacctttcggctgggtgtggtggttcatgcctgtaatcccagcactttgggaggccaaggtgggcggatcacgaggtcaagatatcgagaccatcctggccaacatggtgacatccgtctctactaaaaatacaaaaattagctgggcgtggtggcacatgcctatagtcccagctactcgggaggctgaggtgggagaattgcttgaacccgggaagcggaggttgcagtgagctgagatcgcacactgcactgcagcctggcgacagagtgagactctgtctctacataaataaaaccgttctctacctgtctggaattatgaatccccttgcccttctcgtgtctgagatataaaggtcaatatcgtttgacctttcatttatggcaaatttaaccaaagctggaagtatttttgaactcatattttatttcttttctacattcttatctcataagcaggacattcccgttctaaaccacatgtgatcgccttattggaacaatggaaagagcctgaagtgacagtgaggaaagatggaagaagatggtgcacaggtgagtaagagcatggcaggtagggaggccattgttgctggaaacagcccagctgtcagggaggaagtgcatctctgcaatgtttggaggtttcccttcaaagccctagggcctgggtggaaaaaggctgagacttgggtaagaaataaatatctcaccagcctcacaaaaggaacttcatctttacttattttaatactcactcacctcttgtttccctctcattttattacggacttaagtcactttcccagtgcattattccatctgtgtattgaatttcacttctttcacctcctcttttacatttggatttattcatatattcttagacagtaatagttgaacagagacaggaaaaatgagggttcaggccttgtaattatgtaagacatgccaagcagagggaatagcagatgtggatgctttgggtgggaatgagttttgtgtgcttcaggagcagtaagtaggctcaggcagaattaatgggaggagtaagaagaaaaaagctagagtgctagcaggaatttgaatttgtttgttttgttttgtttttgagtgagacagtcttcttttgtcacctaggctggcatacagtggtgcaatcatagctcactgcagcctcgaactcctgggctcaagccattttcctgcctcagcctcctgagtagctgggactacaggcacacaccaccacacctggctaatttttttaatcttcagtagagacagtgtctcactatgtggctcaggctggtcttgaactcctgggctcaagtgatcctcctgccttggcctcccaaagtactgagattacaggtatgagccatcgtgcctggccaggaatttggattattttctaatgtaactagaaactatgacctaatttacatttttccaatttttgaattttagaaaattctaataaataggaaacagataccagaaaaaccatattaaaatgtacagcttgatgagttattatgaggcagatacctttgtaaccatcactctggtcaaaagataaaacatttttacgggggctgggggacaacaagagggcgagcattaggacaaatacataatgaacacagggcttaaaacctagatgacggattgatgggtgcagcaaacaaccgtggcacatgtatacctatgtaacagacctgcacattctacacacatatcccagaacttaaagtaaaataaaaaatttaaaaaacaggccgggcgcggtggctcacgcctgtaatcccagtactttgggaggctgaggtgggtggatcaggaggtcaggagatcgagaccatcctggctaacatggtaaaaccccgtctctactaaaaaaatacaaaaaattggccaggcgtggtggcgggcgcctgtggtcccagctactcgggaggctgaggcaggagaatggcgtgaacccaggaggcggagcttgcagtgagccaagattgtgccactgcactccagcctgggcgacagagcgagactccgtctaaaaaaaaaaaaaatttttaaaaacaatttttataaaataacgtcaggcttacaaaaaagttggaaagttgtactaagaattttcatatacccttcaacccagattctccaaatgaagagagaaaactcttctaccttcccttaaggctttcatgccctgtacctaatcacagttacctttctccctccctgattaatcacctctagccacttcaaactttgccagggatcccatattctcactcccagtcttacctgctcttctcaagtcagcctgctatgcttatggacacctggttattttgaggttctcaggtctgtcagacaccccacattgtccccctctgccttttcctgcacagatgcctagaccacacaagtcttagctgtagtattttgtctttgtctcctagaattttgccattttgagggtacctcttcatgtagttttgttgtatatgttgtctatagtttttttttttttttttttttttttacagttttgctatcctgtttgctctgtttttatgggggtatttgtttaaattcaaaaacaatgctaccacttccaccattgtggtagtccattttcacgctgctgataaaacatacccaagactgggtaatttataaagaaaaagaggtttaatggactcacagttccatgtggctgaggaggcctcacaatcatggcggaaggtaaaaggcacgtcttacatggcagcagacaagagagaatgagggccaagtgacaggggtttccccttagaaagccaacagatctcatgagacttattcactaccgtgagaacagtatgggggaaaccgcccccatgattcaattatctcccaccaagtccctcccacaacacgtgggaattatgggagctacaattcaagatgagatttgggtggggacacagccaaaccctatcaaccatcatcctagtttatgtttttagataattactccaggtatttgtagtgggtagtctgaatgggggcaagagcagtgcaagctgggggtctgagtggttttgattaggatgttaatggtggacagcggtgagaaggcagagtgttcatcatacattttaatgtaaaacccacaacatgttggtggattgtaaatggatatggaggcaaagagggaaatcaagaaggatcaacaggtttggacttgagcagccgaatggtggtacggtcacgtgagatggtaaagaaggaagggcaagttgcagggcagatctaaaggtgtctgctttccatatgttaagttggagatgactcctgctcatccaagcaaagatgccaagtgggctgtggaatatgcaagtctggagctcagggagagtttaggcttacacatgagaacttgggatgcagctgtgcttggtggctcatgcctggaatcccaacactttgggaggccaagttgggaggatcacttgagcccaggaatttgagaccagcttgggcaacatagggatatcccatctctatataaaatgtacaaattagctatgcatggtggtacatacctgcagtcccagctacttgggagactgaggcaggaggatggcttgagcccaggaagtcaaggctgcagtgagctatgatcgcaccactgcactctagcctgggcaacagagaaaacccctgtctcaaaaaataaaataaaattgggattcattggcatttggctgctatttaaagccatggcactggctgaggtcccttgagagtcagtgcaggtagtgactatttttttgtctttgtttttgtttctgtttttgtttgagacggagtttcactcttgttgcccaggctggagtgcagtggtgcgatctcagctcactgcaacctctgcctccctggttaaagtgattctcctgcctcagcctcctgagtagctgggattataggcacctgccaccatgcctgactaattttttatatttttagtagagatggggtttcatcatgttggccaggtcggtttcgaactcctgaccttgggtgatccacctgcctcggcctcccaaaatgcagggattacaggcgtgagctactgcacccggccagtagtgactactcttaacatttagaggtcttctagaggaggctgcaaaagagactgcctcttttaaggtagaattaaaaccagaaagtggtgccaccaaagacaaatgaagaaagtgtttcaagatagaagagtaggccagacacagtggcttattcctataatcccaacactttgggaagacaaggcagggggaatcacttcaagccaggagttcgagaccagcctgggcaacatagcaggaccccccatctctacaaaaagtttaaaaattagccaggcatagagtcatgcccctgtagtcctagctactcatgaggctgatgcaggaaaactgcttgaacctaggagttcgaggctgcagtgagtctgcgctccagcctgggtgacagagcaagaccccatctcttaaaaataaaaaaaaaaaatagaagaatgatcacctgaaaagtgaactaagctaagcagtgatgagaattgaccacaatatatatatattttttcaagacggagtcccactctgtcacccaggctagagtgcagtggtgcaatctcggctcactgcatcctctgcctccaaaatacaaatgattctgcctcagcctcttgagtagctgggactacaggcgcctgccaccatgcctggctaatttttgtatttttagtagaggtggggtttcatcatgttgtccaggttggtctcaaacttctgacttcaggtgatccacccacctcggcctcccaaagtgctgggattacaggtgtgagccatggcgcccagtctgaccacaatatttagccttgctaaaggaggaaattttcaggggcacctaggggtgaaagcctgactggtctggtaaaaacagaatgggaggcaaggcagtgccaagaatgagcacagcagtcctcttgaggcatttggttctgaagagattttaaaaaataataataaaaaaataaaaataaggtcacattctgaagtatcgggtggacaggagtttgggggacactgttcaaaccaatacaccttgtatcctatcagtctccttatattactttgaggattttcttttttatttttttataatacctcttaatatctagaagtattataccattcttaaaagtctggatttgggaactttttttgcattttgccaactgagttaaaaactccataataatcttcacctagattcactagttcttaataatttaccactttgctctatatctatatatataaaaattttttgccgtaccatttaagttgtgcaattgcaagactttattcctaaatactccagaaggtactaagaattaaggatatgattcttgatagtcaaacacacgaaaacccatttcacctgcagtgcccaccggaggttcatcttaggctcaactgcgcattcagactaagactgcctgtggttgtcttggctctatctgtttggaaaatgccatagcaggaaccccagcttgccagcggggcagcctcacctgttttgtcaggctgcatccttacagtagttcacgcaggatacactcgcatagccctccaaaagtaaggtgcagagagacgagacacacaccaggtgagttggcgagctgccgtgacttaaagaagatacaagcatttcacagaactcagtacccttagcaattccacgggcatggtttccagggtccccacagaagacgtgccatttaaaagagattctacatttagggaagctcagagtatggagctgccatcaggtacttagagttccactcagtccacatgcaacttacctatcagtgtcttgtctcccctcccctcccctcccctcccctcccctccctcccctccctccgctcccctccctcccctatcctcttttctttcagatggagtcttgctctgtcgcctaggctggagtgcagtggcgcaatctcagctcgctgcaacctccgcctcccaggttcaagcaattctcctgccttagcctccggagtagctgggcttacaggcatgcaccaccacactggataattttgtatttttagtagagatggggtttcaccatgttggccaggctggtcttgaactcctgacttggtgatccacccgcttcggcctcccaaagtgctaggattacaggcgtgagccaccgtgcccggcctaacttctgtatctttagtagagatggggtttcaccatgttggccaggctggtctcaaattcctgacctcaattgatctaccctccttggcttcccaaagggctgggattacaggtgtaagccaccatgcccagcctaaaagctaatttttttaaaaaaagacatgcaggtgatgtgtccagacttttttcaagctttcaaaggtgtgcaggttttcgagcaacacagtaaggatacggaaggatgccacagcgttatttcactactgcatcatctttctaggcagtgccatcattcatccactttcctatttagtctttcttttttcacatgcttgggcataattgacaaataatgatgaaataacttaggatgatgagacggaaaaatgttcccaggaaatttattcttacacatgattcttactggaaaaaataagattactgtctcgtagtagattgtagttttataaaaaggtgtagtagagccctaattgtaaaattgaatgaaatttagtatattttgaaaataagtaagttttctctttgttcttttgaaggcctttaagaaagactaaatgtcatgaaatactaattcttacaaatagttagaattgcttgaaaaagaaactcaaaaactaaaaattgaccccatgggccctgatagaatactgaaggttaagacaggttcggggaggtatgctggtctcagttttctttaacacagagataggggatttcgttgatttctgttctcagtgtcccctgtctcctttttggtcatgcttcagccttatctgaagataggccgttatcttcttgggaccatgattatccaaatgtacacaactatgtcatttcaacctccaaaagttttttttctgttcttttatttcaaatatcatttggagctgggcacggtggcacacacctgtaatcccagcaccttgggaggtcgagacaggcagatcacctgaggtgaggagttcgacaccagcctggccaacatggtgaaaccctgtctttactaaaaatacaaaaattagctgggtatggtggtgcacatctgtaatcccagctactcaggaggctgaggcaggagaatcacttgaacccaagaggcagaggttgcagtgagctgtgatcgtaccacagcactcctgcctgggcaacagagtgagactccgtctcaaaaaaaaaaaaaaaaaaaaaaaaatagaatatcatatggattatttgacaagaaaatggttgcacaatagcatttatgactctaggcatttgaactctagagtatagacaaatcctaagagaatagttacgatcagaatttatagttcagttctaggccaggatcaaagacttgtacacaaatgcaaccacatgaacagatcccatccctaatccaaagagcccacagaaccagatatggaagaattatcccaattatctaatttcctgatttcttatgtctttcctaaatcattttagagtttttaaagatttcagaggtctttagagatgtgagtacaacattcttctcataagaataatatttcttgcttgaaaggcacggtactttttctaaacaatgtattttgaaccagttgcctatccagtttcatggacatgaatttgtgtctttgtgacattgtccagatctgttatcgggattacaatgctaatatggttctccccattttgagggtcctcttgtgtagcgtgacattaaaaggcttggaggtagaaggaaacagtccaaagttctgtttcagtggtgactgaagttttgttttgttttgttttgagatggagtctcactctgttgcccaggctggagtgcaatggcgcgatcttggcttactgcagcctctgcctcccaggttcaagtgattctcctgcctcagcctcccaagtagctgggattacaagtgcccgccaccatgcccagctaatttttgtatttttagtagagacagggttttgccat[133 bp omitted]ctcctctttgaattaagttatctaaaggtctctttttctgacaagggggatgaatgggccacagtgatcctaggagataacaggaaccatcctaaaggcaggtattgagttcagtgagttaacatatctaatccagttttgcagttggtttttgtgtacaaacccagtgctttagtggccaccccagtgatctcgtcctatgggcttatcaaataatatggcaatattttaaaaggtggtaaacagttttgtctcaatatatcaaaggaggcaatgtgtatcttatcagcagatatctaatgtctggccgtgctcctcattaaaagactgtttactagattacagtgataatggtccaaccccacattattgagtatgtttctccttgtgactaaacaataatctgtgtgatcttagtttattctcaagaagtacacgtttattcagtttagcagtatatcttgtcatggttttaacaacaaatgataattctcattggaattataaaatatcattctttgtatggagatattttattacgattatttcttttgtatagaaggccggactcattggctcacacctgtaatcccagcactttgggagggtgaagtgggaggacgacttgagcctaggaattggagaccagcctgggcaatgtggcaagaccccatctctataaaaattacaaaaaaattagctggacatggtggcacacacctgtagtcccagctatccaggaggctgcggtgggagggaatcacctgagcctgggaggttgaggctgcattgagctgtggttgtgccactgcactccagccggggcaagagtgagatcctatccaaaaaaaaaaagaaaagaaaaaaagaaaaagaaaaccagtaggaaaccaaagaatgaagtgctagaaagtaaagacatggacgtccttagacaaagttagcagtttaccatattcctgataaagtgacattttattttaaacatggataggataagaaagctccagtctacaaacaaaacatgccagaagatttttaggcgatgatgccacctgcacatggaaccaaaaggtgagaaaatttgtaagaacgtcaaggtgctaaaagggggaaattaggtcagtatgggacagagggagttgtgtcttgatatgaggtctgagaggtgagcagggacaatattatctgtggaaagatacatggattttaatgtaagcgccacaagaaacccctagaaggaacaataaaatatggattataaaaatttcatctgcatcagaaacatttgttagaaaggttgacagtattgatgtccaggaacttcccctatgtctgattcagaggggcgggatgctgcttgaacatccattttttaacaggctcttcaaagattattatccacacctaaatgaaaactgtttcactaatcaccaaccttactattttacataaacacttgttaatctctgcattcctttttttttttttgaatttcataatggtgttttaatattactgagctatttatttctagttggtgttattttcagtttttctcttttcttccctagaattttttttcaaatagaaaaataagatatttttaaaattttctttcagatttgcagttggaagatgatacaatcggctgtaaagaaatgcccacctctgaaaactgtccatcttttgctctacatcagaaaataagtagacagaaaccacgtgaatgtcaggaatatggaaagaccctttgtcaagactcaaagcctgttcaacatgaaagaatacatagtagtgaaaaacccaacagatgtaaagaatgtgggaagaactttagtaatggacatcaactcaccatacatcagagattgcatgttggtgagaaaccctataaatatgaaaaatgtgggaaggcctttatcagtggctcagcctttgttaagcatgggagaattcacactggtgagaagccactcaaatgtaagcaatgtggaaagactattagtggtagctatcaacttacagtacataagagtattcatactgggaagaaaccatatgagtgcggggaatgtgggaaagcttttctagtatatggaaagcttacccggcatcagagtactcacactggtgaaaaaccctttgggtgtgaggagtgtgggaaggccttcagtaccttttcatacctggttcaacatcagcgaattcataccagtgaaaaaccttacgaatgcaaagaatgtgggaaggcctttagcactagctcaccccttgctaagcatcagagaattcatactggcgagaaaccctatgaatgtaaggagtgtgggaagtccttcactgtgtatggacagcttactcgacatcagagtattcatactggtgagaaaccttttgaatgtaaggaatgtggaaaggcctttagacttagttccttccttcatgcacatcagcgaattcatgcagagataaagccctacggatgcaaggaatgcgggagaaccttcagtcgtgcctcatatcttgttcaacatggaagacttcacactggcgagaagccctatgaatgtaaggagtgtggcaaggcctttagtactggctcataccttgttcagcatcagaggatccatactggggagaaaccctatgaatgtaaggaatgtggcaaagcctttattagtcgccatcagcttaccgtacatcaaagggttcatactggagagaaaccctatgagtgtaaggaatgtggcaaggccttcagagtgcacgtacatctcacacagcatcggaaaattcatactgatgtaaagccctatgaatgtaaggaatgtggaaagacttttagtcgagcctcgtaccttgtacaacatagcagaatccatactggtaagaagccctatgagtgtaaggagtgtggcaaggccttcagttctggctcataccttgttcagcatcaaagaattcatactggggagaaaccctatgaatgtaacaaatgtgggaaagcctttactgtttatggacaacttattggacatcagagtgttcacactggtgagaaaccttttgaatgtaaggaatgcgggaaggcctttagacttaattcattccttactgaacatcagcgggtacacactggtgagaaaccctttaaatgcaaaaaatgtgggaagacctttagatacagttcagcccttaaagtgcatctgagaaaacatatgagtgttataccctaagagtctgaggagtgtgggaagtgcttcgtgtgtggctcaaacattgttgaacatcggggaatttatgctggtaggaaactttcaaatgtgaagaatattggcaggtctattctcatcttataattcataatataactcagaaaacataagaatattcctttgtcatttataggtttgtaataccaatatttatactggtggaccattcagaaaaagtgggaaacgttattacttaatggttacagcactgacagcatgaacttttatatgatgcatttattctaatgtgattgtatgaacaagtgaataaaaaaccttggacctcctaaaccactgctgaacttcaaataattcattattttttaaaaccagttaacaatgtaatgaaagcctttagccatggcactcacgttaactatcatcattgttattccactgccttgcagccagttagatattaggcactacacttatcaccttacagcattgttttaaaatggtgataatagaa[172 bp omitted]ggtgtggtggcgggcacctgtagtcccagctactcaggaggctgagacaggagaaaggcataaacctgggaggtggagcttgcagtgagccaagatcatgccactgcacttcagcctggtgacagagctagactctgtctcaaagaaaaagagaaaaattgagacctcaattaaactgggcatctgagctgggcacagttcaaatgggaggtcgggaggctgaggtgggaggttcacttgagcccaggagctcgagatcagcctgggcaatgtaaagagactctgtctccacaaaaaaataacaagtaaaatagaataaattggctatctggcacctatcagggacatgagagttccattggatagctttaccgagaacccagaattgtgtattctgggaagggaaatgtatgcctttgttattatcagtaatatctaacactgaaggaaataaggagttatttggccttgtattgtggccatagtatatctagagacatgtgtgatttacgtttatattttaggtatctgtaaggtaggagattgctagagtttttactctgaagtgcacaactcttaggcaatggcccaatagtttgcaataaatgtgaagatgaggccatttgttgaccaggtcatccagtgctaagatgactgcctgaagtttggccaattgtgttgactgctggggacatcctgtctaagatgcaaagtagcaagattccactaatttaaaaaacaacacacaaaaaatcaatatttatgatggttggcagtgtcgttcatacagtctgcaaactgctattgctgtttacttagttaatcccaagggtctccccaggtagccaaccagtctaggagagggggtgacttcttccagtaccatggcatgtggcaagagactgaggacaaaggagaccacctctcctgtagatggaatacgccagagggcccagatttggctctatcctgtattaaggaggcctcggtagccatgccaagtttgtaggttgctgtttcttgactcaaaacaaatgggcagctaagtattaggtctgtgaaagtctctatttctagaagagcctagtatgtagctagtcagtttgttttaatggaggcatagcatgattttgagaagggcagtttcttgtatcagaagcccttgggaaacttctggccatcagaggtggtctagagactcaaggacacatgagaagaggttgccaaagccttgacagtgaagggatctcttagggcgctaacaaatgtgtctgtcgatgtcaatgtggacacattttaaagactgctggggggaatcaccctgtctgatgttatgggttattatatagctaaggatacaagacactgtggtactggggagggataaacaacataggtctaaagaacagaatagataacccagaaacgtgcaaagaaatataaccaactgatttttgaaaaacaagtaaaagcaaataaatgaaggcagataaggcttttcagcaaataatgctggagcaattgaacgtccatagacaaaagatgtgaacatcaacttaatcccatactttaaacacaaattcactcaaaatggatcacagactaaaatataaaatataaaagtacaaaatgttcagaagaaaatacaggagaaaattgtcagaactgaaggctaggtttaccctaggtaaacccattaaacaaaagaaaaaatatccaaaaataagagtatcagtttccacattaaaaaactaacgaagagaaatgcaaaatgagcagaagagagtatataataaagattaaaatggaagtcaatgaaataaacagaatgaactgtgaagaaaatcagtgaaaccaaaagccttaagaacaatacaactgataaacctctagccaaggattatcaagttacaaagaagcacataaattacccagattgggaatgagagacatgacagattctacagatattgaaaggaaaatcatgaacccatttatgccaataaatctgggaaataaaataaaatgaacaaactctctttgaagacacaaaccactaaagttcacttaagaaaaataaaaatgtatatccctatatttatttttaaaatcagatttgtaattagaaaccttcctacaaagcaaactgtggcttaaatggcttcagtggtatattctaccaaacatttagggaagaaaacctaagaatgcagaaactcttccaaaaaagtggaagcataaggaatgctttccaacttaattggtgaagctattatagtgataccaaaaccacacaaaggcattacaagaaaaccgcagatcaatatccttcatgaacataggtatagaaacttcaacaaaattttggcaaatcaaacccaacaatacaaaaaaaggataacacatcaagaaaatgtagatttaccctcaaaatataaaagttcacttgatatt[140 bp omitted]gagaaaccccatctctactaaaaatacaaaattagccaggcgtggtggcggatgcctgtaatcccagctactcaggaggctgaggcaggagaatcacttgaacctgggaggcggaggttgcggtgagccaagaccgtgccgttgcactccagcctgggcaacaagactgaaactctgtctcaaaaaaaaaaaaaaaaaaaaaaaaaaaaaaaaaaaaaagactttaaaacaaggtaaaacgtgattgtagcaggtaaactctaaaaagaaccccaaatctctacttcctggaattcttacccttgggtacccctcacacattttacaagggttgatctgtaaagcccgtataaaacagaaaacatgagaacatgtaacttccaattttaggttattgaagacactggtctccttcttgggtagactctcctgctcttggatcactttctctgtttgaaagaatccctgtgacgagcatccctatggagagatccatgtggcaaggaactaaagcttcctgtcaactgccatggaaaagagattagaattgaatcttccagcctccagcaagtttcctgagactgtagctccagagacagcttaactgcaatttcatgggggattctcaaccttgacctacctaagctgcttccagattaatgtaatattctaaaatatgtaaacaaatgtagagtgacagaaagcagatcagtggtttcctaaagacgggtaggtggataaggaggaagagattacaaagagcccaagaaaacctttaatttcatggctataaacatgtaccaaaacttgtacctgtgaaatatgtgtagtttagacttcaataaagctgtttttctaaaaagaaaaaaaaatacttaaaaaaatcctcatttcctaattattttactattatctatgctttagaggttatttacgtttattgcatctattcagtggaaacagaatacaatggcgtgctattgcacatatcttcccaactccatattcagagacatcatgttgtagcttgaaattggccaagacagaagtatttacacctagggtattggtaaacactacaaaccagaacttgatctgttgttttattgaccaggtagacttaagaaagcagagaatatgttaataattcagattaaacttaaaagtgtttcatgtctctagtttcccattgtgaacagcacaaaattttgaggaaatattcttccaatattcaaaattaccctacaaaacaaataagtcactggcattattaataaatgactgcagttccaaaaaatttctttactatttcaatatcaactaatatttacttttaaaataggcaagagatatcagtagacattttaccatagaagttatatgggtggcaaataaaaacatgatttaaaatatgctcaaaatcatgaagccttagagaaatgcaagttaaaactacaataagatactattactccatccctagtagcattataaacattaaaaacacagatcatagcaattgttggtgattatgtgacgaaactggaactcttgctcacaatcagggaggcaggggatgtaaaatggtataataactttagaacacaatttggcagtttcttaaaatgtaaaatattcacctaccctgcaacaaaggcattgcacttttagataataacacaagagaagagaaagaatattcccacacaaagacctacacactaatgattacagtagctcaatttgtaacagacaaaaaccaacatgcagctaatagaagaaaaggtgggagttccagaggaaagagagaaacaaggaggaagagggactatttttaagaaatggccaaaactacccaaatttgatgaaagactttttttttattttaacacactatacagatgtaaaaagacataaatataaacacccaagaagctcaatgagctccaagaaggatgaattcaaagagactcacgctgaggcacattataatcaaactgtcaaaagacagagacataaagagaatactgaaagcagcaaaaaagaagtgactcattacattcaagggatactcactaagattatcagatttctcatcagaaaccttagagggcagaagacagaaggcagaaggcagtgggctgacatgttcaaagtgctaaaagaaaagaacggacaaccaagactcctaaatctggcaaaactatccaccaaaactgagggagaaatgaagacattcccaattgagggaatgcgttaccaagagaactgctgtgcaagaaatgctaaagggagtccttccagttgaaatgaaaggacactggacagtaactcagtgccatgagaagaaataaggatctctagtaaaggcaaatacctgggaaaattttaaagttcatattattgtaactttggtttgtactccactttttgttttttatgtgatttaagagacgaatgtgttaaaaaattattaatctatgtttttggacacacaatgtataaagaggtaattttgtgacattactatctacaagtgttggggatggagttgtataagatcagagtttttctgtgttattaacggtaagctggtaaaagttcaaatcagagtattacaaatctaggatgtgaaatgtaatctccatggtaaccacaaagaaaatagttatggaatatacacaaaatgaaacaagaatgaaattaaaatgtttcacatttgaaaaatcaaacacacaaaaagagagtaatataggaaataagggacaaaaaagctaaaatcacatagaaaataaatagcagaatgacagaagtaagtccctccttatcagtaattactttaaatataactggattaaatcctcagagcaaaacacagaaactggcaaaatgagttaaaaaacaaacaacaacaacaaaaaaaacaccgataatccaactatatgctgtctacaaagtttcactttagatccaaagacagaaatagattgaaagtaaaagaatggaaaaagatattccatgcaaatagtaaccaaaagaaagcagggatggacatactggtatcaaacaaaatagaccttaaatcaaaatgtggttccatgagacaaagagagacgttacatattaagaaaagattcaagacagcaaggacatataacaattataagcatttatatacctaataacagaccatcagaatatatgaaggaaaaatacacagaattaacagaagaaatagacagttctacaacaatagttagagacttcaataacccattctcaataataaataaaacaatcagaagaccaataaggaaatagagcacttgaacaatacaataagccaattagatctaacagaaaatatatagaatacacgataacaatagaatacacttgcacatgggatattctccaaaatagaccatgtcaggccataaattaagggtcaatagattttaaaagatatatatcatataaaatatcttccctgatcacaagaggttaggaaaacttgaaaattcacaaatttgcagagagcaaatgacactcttaaataatcattatatcaaagaaatcacaaaggaaattataaaatagagatgaaagaaaaggaaaacaatatacaaaaacttgtaggatacaacaaaagcagtgcctaagtaggaaatttatagctataaagattatattaaaacagaagaaagatctcaaatcaaaaatctaactttacaacttaaaaaaacttaagaaaaactttataacttaagaaacttaagaacaactggccaggcgcggtggctcatgcctgtaatcccagcactttggaaggccaaagcaggcagatcatgaggtcaggagttcgagaccagcctgaccaacttggtgaaaccctgtctctactaaagatacaaaaattagccaggtgtggtggtgcacacctgtaatcccagctactcaggaggctgaggcaggagaattgcttgaacctgggaggcagaggttgcagtgagctaagatcgtgccactgcactccagcctggcaacagagcaaggctctgtctcaaaaaaaaaacaaaacaaaaaaaaaacaaaacaaaaaacaaagaaaacactaagccaaaaatttagcaggaggaaggaaataataaagattagagcagagataactagagaatataaaagcaatagagaaaatcaacaaaatcaaaagttggttgttaggattaacaaaattgacgaaattttagttagaaatgacaaaaaaaagaagattcaaattaataaaattagaaattaaaatgaagacactatgatagagtctatataaataaaaaaaattacaagagagctatgaacaattgtatgccaacaaattggttgacctagaatggatatattctgtgagacacaaaatctaccaagactgaatcatgaaaaactaaaaggctgagtaccatggcttatgccagtgatcctagcactttgggagactgaggcaggagaatgcgtaagcctaagagtttgagactggcctgggcaacatagagagaccctgtctctataaaaataaaaatcagctggatatgatggtgcgtgcctgtagtcccagctactcaggaagctgaaatgggaggattgctgagcccagcaggttgaggctgcagtaagccatgatcatgccactgcactccagcctgggtgacaaagcgagactctttccctctctttctcactctctctcaatgatgaagaagaagagaaagaggaaggagaggaagaggaagaagaagaagaggaagaagaaaaagaaaagaaaaaagaaaaatttgaataggcctatcaacagtaaacatagagaatcaaaaacctctcaacatgaacaacacaaaagccctgacctgacagcttatctggtgaatactactatacacttaaagaactaacaccaatccttcttaaacttttccaaaaaactgaaggataaaacacttcctaactcattttatgaagcagaattgcccttatgccaaagccagccaaacataagagaactacaaaccaatatcccttatgaacactgatgccaaaatcctcaatcaaatattagcaagccaaattaagcagcatgttaaaaggattatacaccatgtccaagtgggatttattcctagaatgcaaggatggttcaatgcatgaaaaacaatcaatatactattccatattaacagaataaaggaaaaaaccaatcatctcttttgatgcagaaaaagcatttgacaaaaattcaataccatttcatgtaaaaaaaaactcaaaaaatgaaataaaaggaaactatgtcaatgtaataaaagccatatataaaaacccatagctaacatcattctcaatggtgaaaaaccaaaagctttctgatcaggaacaaggcaaagatgtcctctttctctgtttctgttcaacatggtactggaagtcctagccagagtaattatggaagaaaagaagtaaaaggcagccaaattggaaaggaagaagtgaaattatttctgatcccaggtgatattatatgtagataattctaaagttttcacacacacacacacacaaagacttaaaattaataaatgaattcagcaaactagcaggataaaaaaaatcaacacagaaaaatgacttacatttccatacactaacaatgaacaatctgaaaaggaaatcatgaaaacagttccatttacattagcatcaaaagtaatagaatgcttaggaattaaccaaggaggtgaaaacttgtacaatgaaaactacaaaacactcctgaaagaaagcaaagacataaataatggaatgaaattccatattcacagattgggtaacttaatattattaagatgtcaataccacccaaagtgatcaatagatttaatggaatcccaataatatcttgtgcagaaatataaagatccattctaaaattaatatggaatctcaagggatcctgaacagccaaaagaatattgaaaaagaacaaagttgaaggtctcacacttcctaattttaaaacttactacaaagctacagtaattaaaacagcatgaaactggtgtaaggacagacatacacaccaacagaattaaaatggagctcagaagtaaaccctcacatatatgctcaaatgatttttgacaggagtgccaagaccaaccaatggggaaaagacagtcttttgaacaaatggtgttaggaaaatgggatatccacatgcaaaacagtgaagctggacccttacctaacaccatacacaaaaatgaactccaaaaagtgactcaaaatgaatcaaagacctagatgtaagagctaaaactataaaaactcttagagacataggtggcaatggttccttatatatgacaccaaaggcaaagacaccaaaagaaaacatagacaaattgaacctcatgaaaatttaaaattttctgatcaacggacactatgaacagagtaaaacggtccacagaatgggagaaaatatctgataaaggattagtacccagaatatacagaaaagttgtaaaactcaacaacaaaacaacccaattcaaaaatggaaataagaagccgggcgcagtggctcatgcctgtaatcccagcattttgggaggcggaggcgggcagatcacgaggtcaggagatcgagaccatcctggctaacatggtgaaaccccatctctactaaaaatacaaaaaattagctgggcgtggtggcaggtgcctgtagtcccagctactcgggaggctgaggcaggaggatggcgtgaacccgggaggcagagcttgcagtgagccgatcgcgccactgcactccagcctgggcgacagagcgagactccatctcagaaaaaaaaaaaaaaaatggagataaggaggggtgagtgaaaaaaaaatggagaaaatacttgaatagaaatttccccaaagatatacaaatggccagtaagcacatgaaatgatacttaaagtcacaaatcattagggaaagcatatcaaataagatactacttcacacccattagaatggctaccaccaaaaaaaacaaaaacaagtgctggtgaggatgtaggaaaacaaattttttttttttttttttgagagggagtctcactctgctgcccaggctggagtgcagtggcgtgatctcggctcactgcaagctccgcctcctgggttcacaccattctcctgcctcagcctcccaagtagctgggactacaggcgcctgccaccacgcccagctaattttttgtatttttagtagagatggggtttc[131 bp omitted]gtaagaatgtgaaagggtgcagttctgtggaaaacagtgtatgtcaggtcctcaaaaaactaaaaatagatttactatatcatctagtaattctacttctgagcatatacccaaaagagttgaaagtagggtcttgaatagatatttgttgtgcactcaggttcagagcagcattattcgaaataggcaaaaggtggaggcaccccaagtatccattgacacatgatagagaagcaaaatgcagcacatacaaggaaatactaatcagccctaaaaaggaaattctgacatatgctccaacattgatgaaccttgagaatattatgctaagtgtgaaataagctagctacaaaaagacaaatacttattattctacttatatgaggtacctagagtggtcaaattcatacagacaggaagtagaatggtggttttgaggggctggggaagggaaaatgggaagttattgcttgacaggtacagaatttcagttttgcaagattgaagagttctggagacgaatggtggtgatggttacataacaatacgaatctacttaataccattgaagtatacactaaaaatggttaggatagtaaatttcatgttaagtatatttcatcagatttttttaacatttttaaataaaccataaaaaactatggtgcactcacccagtatagcactactcagtagtaaaaggaatgaactatatatacacacagcatggatgattctcaagataattatgctgcatgaaagaaaccagaccaaaagagagtataaatactttatgattccaattgtgttaattctagaaaaggcaaacaaatctaaagtaaaaaatgtaaatcaacggtttcctagggaaggcaaggagggaatgtaaaggggcatgaggtagctttgcaggtgatggatacgttcattatcatgattatggtattggttccctgagtgtacataatatatgtacaaaacttaccaaatatgaataattattgcatgacaatcacatatcaacaaagcattaaaagaaactgttgcacataaaaatccaacttcctactcattttagaaaatccgatttggcaaccctatattgactctgtcatctctttcttcttgccttgggagcaaagaatggctggctacgtcatagatactacagtccctatagtataggatctgctttttctcagtccctattttcctgccagcacagcactggccttcagatgcacagcacggagatggtaatccacaaaaccaaaacctttagattatttgctctgccagtaacattagtcataggacagaggtctgaggtcctgagaatttctgcaaaccctgaatcctgcacagccacattcaagggagcattcacggatgcacatttagcagagttccatttctgctggtttgctataatctcgcctactccctattaatcacatccagtgtttctgtacaaattatggtcccagctgggcctggtatgtcttacagttaagagatacctgcctaatgctgaacttcagggcatatggctccttggcaggtgctaaacagcatctgctttacagtattggggaatatggggcaccccctgggaataagggacccaattcatgctgttcccacatgcactggaggttgtcacaactgccccctcctcgggataaaaattcacgccattcagaccacaatattatacccataaattcctacaatttttcctaggaggccttggtggcaatgcaaatgaggtcaaatctggattgacagttgtttctctgccatcctcctgtcccctccaagataatctggagaccccttcagtttggtagatcttaactctgctcttgaaccaccccacacagtgatcagaacatggaagactaaaggcggctttatcataaggccattatcatcacatgaaccagggcaatacacaggagataagttgttgtgtagagtaacatgaaggctggacaaatccttcacaggcataacatgagaccaacaatgtcccagaaaaagggaaaccttctctagaacaagctgttggcaaaaccctgctcaggtcttcacagccaaaagctggtcatgtccatggctaaaccagccatacagggcgggaatgacatcttcccaaggcttcagactactcctaattccctttagggattggaaagagagaggagaggtctgccttccctgagcacagtggagtggtggacacactctttggagagctgcagtgtgtggtgctgacatggcttctatcacaaccccagcagtgaaaaaacgctgataaactctacagtaagagaatgtaacttgtctccagaaagcttccaacacagctagcattcctagggaacctccccagggtgggtacttggatgaacaagtttcaacttgtagttgacagcgccctgataaggtctgttctcagagcttatctctggtgtgtgctgtgaacagggaaggagcacattctccatgctcctttctctgatgtgaatcttctgatgccgaatgagggtaggcctttggttgaaggctttcccacattcgctgcattcgtaaggcctgtctggtttgtgaactttcaggtgctgcctcagattggacctctgcctgaaggttttcccacattcgctgcactcataaggccgctcgccggtgtgaagtctccggtggttattgaggctggagctttggttaaagaatttcccacattcactgcactggtaaggccgttcaccagtgtgaagtctccgatggctattgaggctggagctctggctaaataacttcccacattcattgcattcataaggccgctcaccagtgtgaactcgctgatgtttcatgaggtcagagcttcggctgaaggctttcccacactcaccacacccgtgaggccgctcgccagtgtgaactatctgatgttgaatgaggctggcaatgtggctgaagaatttcccacattcgttacacttgtaaggtctttctccagtgtgaactctccaatgtttaattaggctggagttgcagttgaaagatttcccacattcactgcactcatgggcacttctgcccgtatgaaccctcttatgatgaatgaggttggaacgctggctgaagaacttcccacagtcgctgcactcatatggcttttcaccagtgtgaaccctcttatgctgaatgaggttggagcttcggctgaagaatttcccacagtcaccacacacgtgagggctttcaccggtgtgaaccctgcgatgtttaacaaggctggagtgctggctgaagaattttccacattcacagcactcatacggttttcctctattgtgaactttctggtgttgagtgaggtcagcggcgtaagtgaagaagattccacatttgctgcattcataaggcctttctctgctgtggattctctggtgctgaacaagagtggatttgttattgaaggcatccccagattcacagcacttgttatgccttagtgcaatgtgaaaatccaccacaccttcggtggcctcgtgcggctccccatcgctgggagtgacctcacactgcagaaaccctgctgtggccacaaagtccttcccaccctccctgcaggtggaaagctgatctgatgtgtggtctctgcaggtctttacaggggaagcctggccctcctccgttctgatagggttgtgtacgttctgctgcacctgtttccggggaaggtttgcactgaactcagagcctttcacatatgcctcacacacaaatggtttctgcctgggatgtgttgtctggtgttcagccaaatgcaaaatgtctttcaaacgtaggccacatatgtcacaggggcaggtcttctgggggcacagagttgcctcgggactcctgtcctgtgccactccttctacagaaacgttatgctcagaaggtaagtccttgccctctgttccatggcaaaaatctgaaagcagagaaatgctggtgaagttcgtataaactttaatagaaggaaagagccccatcacctatgcttggctgacccaagaataagcccatgggattgttggcaacacaagaaggctcaggtcagggtaaggaataatctgctccgccatactgtgcctggccaggtcacaaaatacaggaggccttatcaggaccagggacacaaggatgggggacagtattgggcagagaggcagggtctcccactcacttctctttaaaggccttttggcagggcctgggctgctggtaacctgtgagggctatgcagtgagagcatctagacccagcaaaacctgcaactgagtagctggtgttcaagcacatcaaggaaaagcacgtatctcacaacacattaagtgtaggccagtgttggaaagtgccgcagaggaagctgaaagagagaaacggaggccagaaaagtggggcacagccaaggggcccaactcagaataataatgacaagtagataatgtgtcaagcacggggaaggaaaagcagagacgtggtctggctactggcattggtatcaaatgatgatgaataggagagaagatgctggtatgatgtaaacacagtggtgaagtcacatcctcccctagctcccatcgctgcttaccagagccaggcctgccataagcccctctggccatggctgatgtcatatccacactgtcaggcacccagggctctttccccatctccaactgggaaacgatgtgggacctgaaagatataagtcctaagggaaagacagagtgggtcagtggccagcacctgcccagttgaactaccccatgatagactacaagacaggaagctccgtatgacacagggacattgggtggtcacggcaagcagtaaccacatcagtgattggaattcctggcacagtcaggcttaggaaatattagcaagaggaaaggcacagaatctaaaccacagaactgtcagatctggataatcacccaggagggaatggccgagtcagaggtagtcacacagctaaccgcaagacccctcatgcctggagcttccctgcaaggcttcaggcagcaggtgtgggggcagctcagggagaggagggaacaatgcacatagctcagccccagaagccacaacacacataccaggaaagtggggatggaagcagtgccagcggtctggctgtgggaaggaaagagctgtttcttgggcaaaggggacaggcagagaggagctcgggacaccggggtaggggtgacagccttacccagcgaggctataagtgcaaagttttccagcatcacatcgcagtacaggagtctctgagcctcatcgaggagcacccactcctcctgggagaagtaaatggtcacgtcctcaaaggtcacgcagccctgccatgatggggacagttcgttccatgatcagtctctgtccttgggactccctatccatcccctgctcactctcctccccagctccacagctccaggaggtagcaggccctggttctgtgggcgcctcatgtgaccactgtgtcagcccgcagcagcaacaggcagggtgcagagaggcaccctctaagctctgggcctgaagtccagggcccagctcgctcttctgccagcctcttcccctagtgtcaccaatgtcatgcttctcagatacaaatgtgggcttctcctttaaaccccagtccagagccctggggtgaacagctcatactccctcccacgtgcgtttcactctttggactgcaccaccctcacagctccagaccttcaccacggcctcccattgccactgctaccttctccccatcctggcccctatcctagccatctccatgggctcccacgagtcactctgcacatggcatccagagagtgcctggcaaacataagcaccatcccagcctgccccagacctttgatggcctccactgccaagggcaacacccaggtaagggggagagggagcgctccacccttgccttggagccccctagctcccctggcctggcttcaacctaagccacccacggcacacatggatgtcacatacacttggccttctttgttgcacattctgaccctgtcatcactcacactcatttaaaaaagaaaaaaaaagccaacccctctggccatcctacccccacccacctaagcccagcaactctgccaactgactcctcttgccccaagctaattccccagcctgaggacaaaccccatcaagggtcaccacagaagcctggtgagaacataggtgagtgtgtaagcaccagcccaggcctcactgcaatattacctcctctactgctaagcctcagcatccatctcattcatgtctacactctttgggatgatctggccacctgccagaccctctgatacacccacatagcccctccatcaccaccatgaccactactgttcctcacctgtctttatgatgccaaacaagccacagtccccaagcaagaaccctgctctcagttttccagccccaccttcctcttttttttaacatcattgtcaccatgacctgaagtttcacctcctaaatctcacacacagctacactcccgtccacacaccagatgtcacattttggatgtttctaactgttgaaataaacaaagaccaatgaaatgagaaaagccaaggctacttactcaaagctcactatagcaagagagactcaatgcaagccgggagtgggagagttttatagcaaaagaaaaggaaggcttcaggcgtgccctggttggaggctcctgttcgtaggtgggtgaactagaagtgggcatcctatgtgattggttagggtgcgtatctgcctttctctggttgttcttaaatcagaagcaggagcaaaaatgaggaaagctgtctgttattaatcaaaccctggccatttgggactgctcattacagaagttattgtttttacttcctggattgtcagtccagatagcaatctggcttcctgtgggtctgacagacagcaggctggcttcctgctgtatgggttgtttattgtagataagggggttggtttcctgggcaggttctggggcagagttctatttgtatacatgatctggccattgttcgaatgaatatccagtctctcattaccttaacaactccctcagaacacccgaactgtgtgttcagcggcccactcttcaactccatttgggggtctctgggacatcacaggctcaacttggccaaaacctaacttctactgcttccatggaaaattcctcctaaaaccaacttctcagttcataaagctggattcatcaaaccaaaaaccatggattcttccctcctctttctcaccctccacatcggaaaatttggtcagcttgacttaaaagacatcaagttcccaatcacttcctctacctccagtcctcactctggtccggccagccgcagcactggcctgggctattccattaggctactccttggcatccctgcttgcggctcactccatattcagttctccactgtgcatccacagggagcctgttaagacctgagtcacagcatcttcctcctctgccctaaaccttccatggctcccaacaccctcagaacagaggcccagctctgccgttctgagctgtcttcagcccacctgctctctggttccagcagacataatattaataacactgacctgggtggggttccttgaacactcccaactcagtctccacaccgtgccccaccccacccccaagcttttgcgcacgctggttcctgtgcctacaaagccctttctccctccatcccattacatttcagcaacggaagccactttatataaaccctgccctgattcaggatcctagctgggagcaactcccttccagggtcccctgactcaaaagcaaggaaatgggaaaggcgaaaagtcctagaacaaagccatcttttgcgtctcaacaccgagaacagaagcgtggggggccgacagcgaagggcctaacgtccaagcactcacctgcgcggggtcccgcagcgccgccgctgccatcggagtctgtggtcagagcagggccccacggtgcgggaaaccacggggcgggggtagggggtctcgcaggctgaggctaccacccacctggccgtgccccagacgaggtgtgaccccgggctgagggtcgcactcctagcctcagtctcccccgtgcaaaatgcgcaaggggcccggggcgcaggctccgggggcgccgagagcgcgcagctccgctgggtacccccgttgcaaggggtcacggctggtgcaaaggcgcggagggggtcccggcctcactgtccccctcgcggtccgggaaagccggcggggcagcttcacgggcgtagccccagccgccccgcccccaactcggggtccccagctcctggggactcagcctccccgccgggaaatgacctgcgaggctgcagtgcaggaagttccggcccccaccgtggcggccgggagagttgccctctcccgtactgtcattggcctggcgccagccgctggtgcacaggcagggcctggggatcgcgagtttctgcccagcctctcgtcaggctgagggtccagggcgggaaggagagcggatctcgtcgggtctccaccgccgccgcctgcagccctcgggccttccccttaaaggggccgctcccgagcctgcagccgcccgcgctaaaccccgcccaccctccgaggtccaggaggagagccccagtgctcttcctgcgcgtgtgggcatcggccagccgcttcacccctaagggacctaaattcacactggaaaatggggatagtacccaatgggcggggtctttgcgttgtaatattaaatgtcgctctgattcagggcttctcaaaccagcaacatcagcatcacctggggactggctgaaaatgcaggttctggggcaacaacttaaatctaaggactcagaaattctggggatgggattcagccttctctactttttgcggggggggcgggggggatgggtctcgttctgttgtccaggctggagtgcagtggcctgatcatagctcactgcagcctccatctcgggctcaagctatcctcctgcctcagcctaccaggtagatgggatacaggcgtgcaccatcatacacagctaattttaaaattttttgtagagactggatctccctgtgatgcctaggctggtctcaaactcctgagctcaagtgatcctctcacctcggcctcccaaagtgttgggaattgcaggagtgagccatggtgccaggcctccttctctgttttaacaagccctctggggactccaatgctggctccaactttacagcagggactctcattgaaatccagtaaataaaatgggaaaaataacactacattgttgcaggaagtcagggaccccgaacggagggacctgctgaagccgtgacagaagaacattaattgtgaagatttcatggacatttattagttccccaaattaatacttttataatttcttatgcctgtctttactgcaatctctgaacataaattgtgaagatttcatggacatgtatcgcttccccaatcaatactcttgtgatttcctatgcctgactttactttaatctcttaatcctgtcatcttcgtaagctgaggatgtatgtcatctcaggaccctgtgatgattgcgttaactgcacagattgtttgtagggcatgtgtgtttgaacaatatgaaatctgggcaccttaagaacaggataacagcgattttcagggaacaagggagataaccttaaagtctggctgcctgtgggacgggcaggacagagccatatttctcctattaccaaaaacgggtaagagaaatatcgctgaattctttccccagtaaggaatattaataattaacagccctgggaaaataatgcattcccagggcagtgcctctaaaatggctgccctgggagtgtctgccttatgcacatgtagatagggatgaaacacaccctagtctcctgcagcgcccccaggcttgctaggattaggaaattccagcctggcgaactctagtcagaccagttctctgctcttgaaccctgttaagatgtttataaatgacaatgcgtgcacagcaggacatggaagctcatgagtgattctagttttgccctgaccttgtgatctcgccctgaccttctgccttgtgatcttttgttgcccttaaagcatgtgatctctgtgacccacaccctattcgtacactccctcccctttgaaaattgccaataaaaacttgctggttttatggctcgggggcatcacggaacctgctgacatgtgatgtctcccccagacacccagctttaaaatttatctcttttgtactctttccctttatttctcagaccagccgacacttagggaaaatagaaaagaacccacattgaattatcgggggtgggttcccccgatactacatgtcatatggtgaaaccacctttgtaaaaattataactgagaaaattatgacagtgagagatctgacctaaccaactccatcttgcttctaacctccaagctgtccttgttcgttcctgagcataggcctaactaactttgggagaaactcagtttacagtttaactttgaagcaaagataacagccctttccctctaggccgggcatggtggttcacccctgtaatcccagcactttggcaggccgaggcaggcggatcacgagttcaggagatcgagaccattctggctaacatggtgaaaccctgtctctactaaaaatacaaaaaattagccaggtgtggtggcgggcacctgtagtcccagctactcaggaggctgaggcaggagaatggcatgaaccccgggaggtagagcttgcagtgagctgagatcgcctccagcccgggcaacagagcgagactccatctcaaaaacaaaaacaaacaaaaaaacccagccctttcctgaaacaaaccctcttcttgtctggggaccagactgcctttgtaggattaacaaaagccacaagattagagagtatggtttaggagtcatgcagccaggggccaggggtcacaagattttaaaccttcccaattgctactggggataacatcactattgtaaaacctaagattggtgctcgagatatttttcagacccagcactcgatggatcagctagtgccacccagattgataaactgggtcatctggtcctgtggtccccaccctggaatttactcagtgcagttagtcaactttgactccctgtgatttcatctctaacccaactaatcagcactccccactacctggccccccacccaccaaattatccctgaaaacctctgatcactgaattttcagggagatcaagttgagtaataactctgtttctcccatggcatggctggccctgtgtcagttaaagactttgtttactgcaatgccgtggtctttttgtagcaggcaaaaagaacccattgggtggttacaatggtagataacagggcccaggacagaattcctgctgggtgcataaaagctattgtcattaccaacaccatcatcacaagaatcttacaaacactgctgtggggcggcagggaagagacacctctgtgcagtcttttggatgtttgtcaaaatatacaatgactctaactcagcaagtaccgcctcagagggaatagttatgatttttacatgaaagcacaccatagtaacatttgcctacttgattttattttattattttcttatagctgcatttttttgtttttctaaatttataaaataatatataattattgtatgcaacatgatgttttgaaatatagatacattgtggaattgatagggacaggaggtagggaaattctgggcagaagaggccaggtccatcaagctgaaaatcttgataccacggcccaaagtgagaacttacatccctgttttcccactcaaatgttgccttttccaaaaccacccgtggctcaccctgccccccatcctatgcccataaaaaccccaggctcagccggcagagagaagaaaagcagctggacattggagactatggttggatgttggagagaagcaggctgacttcaaagggacagcttgacagcgtagctttggagaggatggccagggatggccaaacttcaggggacgattaccttcctgctccatccccttttcagctcctcttcctgctgagagccactttcaccggcaataaaatcccctgcatttaccatcttcaatttgtttgtgtgacctcattcctcctggatgccagacaaaaacttgggtgccatgagtgtgggtacaaaaggctgtcgcactgaccctccactgagctgttaacacttaagctatgcatggatggcaaagctaaaagggcactgtaacacttcgtcaggggcttcaggggtcacagcaccttcccctagacactgccgtggggctagtatggaatttgctcttgccagcacccaaaagccctcaccctgtctcctgcacccactcacctgtgctcccctccccatgaggggtggaacaacaagcgagtggagttcgtccctgacagcgcccatgtactctagttcccatccaagaaggggtcagggaaatatcctgcttcagaatgactaaatcaagctcattaacatatgcatcacttcacattgttttgttttgagacagggtctcattctctcacccaggctggagtacggtggcactatcgtggctcacagcagccttgacctcttgagctcaagccatcctcccacttcagcctcccgagaagttgagactacagacgtgcaccacaacacccagctagttttttgtatcttctgcagagatggagtttcaccatgttgtctaggctggtctcaaactcctgggctcaagcactcctccttgccttggtctcccaaagtgctgcgattactggtgtgagccatggcaccagccttagttatcttttttgtgttgagaagacttaaaatctactctttaagcatttgtcaagaatacaccgtaactacagtcaccaggttgtacaatagatctcttgaacttattcctcctagctacctgaaattttatatcctttgaccaacattgccccactcccaccacctggcaacctcagcctctggtaaccaacatttcactctatttctatgagacaacttttttaggttccatatatgagtgggattatgtagtatttgtcctctgtgcctgacttatttcacttaatataatgtcctccggttcaaccttgttgtcccaattgacaggattttcttctcttttatgaccaaatagtattcagttgtgtatctctaccacattgtacaaatccgtttatctgttgatgagcacttcagtcgcttgactattgtgaacattgctgcaatgaatatggcagtgcagatatctttttgacataccaatttcaattccttgtgatgtatactcagtagtgggattcctgggtcatatggtaattttatttttatttttattgatttatttctttgggacagggtcttgctctaaagcccactctggagtgcagtggcatgatcatagctcattgccattttgacttcccaggctcaagtgatcctcccgcctcagccccctgagtaggtgggaccacaggaatgtgccaccacacccagcttatttatttatttatttttgagacagggtctggctttgttaccaagctggagtgcagtggtgcagtcttggctcaccgcaatctccatctcccagattcaagcaattctactgcctcagcctcccaagtagctgggactacagatgtgcgccactatacctggctattttttgtatttttagtagagacaggtttcaccatgttgaccaggctggtctctaactcctgacctcaagtgatctgcctgcctcagcctcccaaagtgctggcattacaggagtgagccactgcacccagccactaatttatttttatctggaaaagaaaagaggttcatttggctcaaggttctacaggctgtacaggaaacatgacatcagcatcagcctctgatgaggcctcaggaagcttccactcatgatggcaggtgaaggggacctggtgtgtggagatcacatggcaggaagcaagggagaactattattactgtggggtcagcaccaacacattcatgagggatccgctcccgtgagcaaaacacctcccactaggccccacctccgacactggggatcagtttgcaacctgagatttggaggggacaaatatccaaattatatcaggtggacagtgtggctgaggctttccctgcttcagacggaattggacacaggctctgggagagaagatacaaagtgccgagaccagctcagtcagggagaccctaacccagcggcactagaggaattaaagacacacacacagaaatatagaggtgtggagtgggaaatcagggttctcactgccttcagagctgagagcctcgaacagaggtttacccacgtatttattaacagcaagccagtgataagcattgtttctatagattatagattaactaaaagtattccttatgggaaacaaagggatggccaaaacaaagggatgggtatggctagttatctgcagcaggagcatgtccttaaggcacaaatcgctcatgctattgtttgtggtttaagaatgcctttaagcggttttccgccccaggcgggccaggtgttccttgctctcattccggcaaacccacaacctttcaacatgggcgtcatggccatcatgaacatgtcacagtgctgtagagattttgtttatggccagtttgggggccagtttatggccagattttgggggtcctgttcccaacacaaaggggtgaggaatgaggtcgagtgttccaacacagttttagcaaatgcaggtacagacacccagggtgggtgtaactgaaacgcatgcttcatggagatgcactcagctgagatgcctgatgtgtgtggggagggtgggtgcaggttagcctgagcatggtggcagcgtgggattcggacacagaaatgatttgcaggagtcagaggagggtcggtgtgctagtaacctactgctgcacaacaaattatccaaaaacgcagaggcttaaaacaacatccttttattatctcttcgtttctgtgggtctggaacccaggcacggctctgctgggttccctgtttcatggtctctcccaagaatgccatcaaggtgccagccaggacaaatatctcatctcatggctcaactggaaaggggtcacttccaagttcattcacttcatacaacctgtcggactgagggcctcagttcttccccggcttttggcctgaagctgctttcaattccttccctcttgggccttgcagaacggagagcttgcttcattaaagcaagcaaaccaagaaggcagttgagtttgccataagacagaagtcacaatcttttgtaatctcatcatggaagccacctcccaccacctttgccatattctttgggttagaagcaaagtcataaagtcgggcccacactcaagggaagaaaatgacacaagggcacccaaacaggaggtggaggttgttggaggccctcttagaagtctgcctaacaccagtggggaggtcccgagagaaaaatatctcaaactaccctccccccgggtctggactctccttgagaactatttaaagagagaatcttttaagggaattaagtggcaaagaaaaaaagttataaaaatgctaatactccaaaaactttctggggagttcctaatggtttataagcactgtgcttagtttcttacgagactgccttttaaaaatagtaattaatgggctgggcgcggtggctcgcatctgtaatcccagcactttgggaggccaaggcgggcgtatcacctgaggtcaggagttgcagaccagcctggccaatatagtgaaaccccatctctactaaaaatccaaaatattagctgggcgtggtggtgggcacttgtactcccagctactcaggaggctgaggcagcagaatcacttgaactcaggaggcagagattgcagcaagccacgatcgtgccactgcactccagcctgggcaacagagtgagactccatctcaacaaaacaaaacaaaaaatagtaattaatggaaaacaggtaattcacctgtaatttatcaaaaccaaagcttcctcaccccaacccctacacagggtcaaattcagtgttttgtcctcgggaaaaacctgacagtgttctagttgtcttttgctgcaccacaatcatcccaaagtttcacagcttagagcgatgtgggggttttttggtttggggttttttgtttgtgtgttttttaagacagagtctcagtctatcacccaggctggagtgcagtggtgcaatcactgctcactgaagctttgacctcccgggttcaagcgattctcccgcctcagcctccctagtagctaagaccacaggctcataccaacacacctggttaattttttaattttttgtagagacagggtttttccatgttgtccaggctcgtctcaaactcctggtcccaagcattcatcccatcccagcctcccaaagtgctgggattgcaggcacgagccactgctccagaatcaaagcaatgtttattctgctcacgaatctacaacttggataggactcactggggctcatgtctgcttcactcagcatcagctgggccacttgaagacaggggactggaaccttctgaaagctctctcacttacaagtctggcaattgatgctggctctcagatggggctgtgaccaggatacctacaggtggcttttctgtgcatctgcttgggcttcctcacagcatggagactgggttccgaggatgagcaccctgagaaagagagagccaggcagaagttatccccttttatgacttagccttcaaagtcacctggggtcactcctgccacagtctcaggcctgctagattgaagggatgggaacataaatcccatatctccatgaaggagatcaagtcatcgaggtcattgtaaggagggcatgtggcataggatatatccgtgcattcacctttggaaaatacaatcagccacagagagcaaacaaccccaccaccatcccacccctgagctttcacgggtgtcagtgacaacaagcatcgtaggatgaaaagaagtcagcaatcatgaaaaaataaagcagcaagaagtacaatcctttccacctcgtctcccatgagagcaggaggttgggaatgaatccatctccctgaactagagaagagacgtgcaaggtcactgggccgagcctgtgggtttgggtttctcagctggcctgttacgatgaagcttgttcttgtctattgctgcacaccaaattaccataaatttagcagctttaaacaacacccgtttattatctcacagttttgtaggtcaggagtccaagcaggcttggctgggttctgctccggtcattacaaggctgaaatccaggtgtccgccagaaattctgttagccagggcttctatcatcagttcttctctgcagggcgctgctagggaggtcctgaccaccagagggcactagaaccacaatcccggtcccagggaactttgcttgtgctcccgcccctttctgtcaaaatgctgtccggccaccagcggcagcagcgtctgggaacttgtttgaaaagcagaacctcaggacttaaaaccagacctgctgaatcaaaatctgcattttgtcaactcccccacccaggcaattggtgtgcacccttgagggccaggctgtaactcagtggttctctaccttggctgcgtgttagaaccaccagaggaagtgtgtgtgtgtgtgtgtgtgtgtgtgtgtgtgtgtgtgtgtgtgtgtttgagatggagtctccctctgtcgcccaggctgtagtgcaatggcgcgatctctgttcactgcaacctccgcctcccgggttcaagcgattctccctcctcagcctccagagtagctgggattacaggctcccaccattacgcccggctaatttttgtattttagtagagacggggttacaccatgttgaccaggctggtctcgaactccttaccccaagtgatctgcccagctcggcctcccaaagtgctgggattacaggtgtgagctaccgcgcctggcccagaggaacttttaaaatccctgatgcaagggactacccccagagattttgattgcattggtctggggtgcagcctgctgcccggattgttaaaagtttccctggggattttactgtgcagttaaggttgagaagggctgcaagcctgggtcattgcacactgtaagaaccttgtgtatgaatggaactgtgctatggaacaactccacaccacctgtgtgtgtaggcataggagaaacacataaaccctgaccctcaagggtctcctggaatgcaagacctcagccctcaggggccttcagataaaggtgcggtcagggcaaacatggaacaccaaggacgtgtgatattattttccaggtgcttcaaagactcaagtcaaacaccaactgctcagatagcaaattctagttcacccaccccacccatgctcagtgatggggctcacggcagtttcctgtaagtgtttgctgggctcgcctttctaactccactgtgggccccctgagagaagtaatgagtcgggtccccactcaatggagccctgttcgcagttgcttttgtgacgtaggaagaaaccagctggtggtggaattggtgagttgtgctccaggaaagaaggtgcctggaagacagagatcagcgatgttaggaggcactctaaaaaaatatattctttcctatttatatagagcttcatggttcccaaagcactcttaggtgcactgttgcatttttgtaacacccatctgcattagattagagtttatctgtacagatgaggaaaactgagtgacagaggcgtaaatagatatgcgggaatttgcatgagtcaggcagaattagaacaagaaatcgccttcctaaatttcctaatttcctatatgctgtttccaggatgtagcaatacccagcttctgacttctctttcctcaccgttgagaccatttctgggggattttgtcttcattctttctttttgttctcctccccaaaattgtgggtttgtttagtcattctggaattctctgttaatctcccaccaaatgtccattgacgtacttgatttctcatttttgaaggaagattcaccaggtgtaaattcttaatatatgctagcaaagacaatgatttcatcacattataaacttctcgaatgcaagaaacttatttcccattttatctctagcacctttgacaaatatttgtggaatgaatgaataatgaatgaaggggatttgcaaagttaaatgtgagtgagggaggaagcagacccaggaaattaatctggagccagtctgcaggtggtgtggtgggcgtggttgtaacctctggaccaagagctgtgaacgatggtgcacaaagaaatactgtcagcaccacagagagtgggttttatcttctcaaataatggccaactttcctgcatcttcttcccttttcctgctcctcttgaggatgtattccctgctcaaatgaaatgctgaaacgtggctgggcgcagtgactcacacctgtaatcccagcacttggggaggccgaggcggatggatcacctgaggtcaggagtttgagaccagcctggccaacacggggaaaccctatctctactaaaaatacaaacattagccaggcatggtggtgcaggcctgtaatcttagctactcgggaggctgagggaggagaattgcttgaacccaggaggtggaggttgcagtgagccaagattgtgccactgcactccagccggggtgacagagtgagactccgtcgcaaaaaaaaaaaaaaaaaaagggctgaaacgttctttgaagaattcagcgagcctttggatactgactttcagtaaaggcctccccggctccgtgcctttttttctataaagtgtccttactcttctggggtcagaaacccttccccttctggggtccccaaacaatgctcctccctgagacaaatgaggtgtgggaaggatgtgagtgacatgcccttcttccaccaccagtgtttctgctgaaaccatattcactttattaaattaatcagggaagaagggacggggagaaatgaaaataaccaagcttgcagcacattcagcggtcatcatgaggtcatcctgctctctgacctgccctttctcacagtggtttggtgcctgttgttctagaatcacacagacctgttccaagatgatagttccccttaactgctc[136 bp omitted]tggtgaaaccccgtctctactgaaaatacaaaaattagccaggcatggtggcaggtgcctgtaatcccagctactcaggaggctgaggcaggagaatcgcttgaacccaggaggcagaggttgcagtgagccaagatggtgccactgcactccagcctagatgccaagagcaaaactgcctcaaacaaacaaacaaacaaacaaaagaaatgttaagttttccatttgagatattttttcaggttctgtatactgatgaaaccactgatgccatttggtctgaaggaacccacaggagctgctgactcactaaagaatgcagttttcacaccctgatttcatccccctaaccccaagcaatcaaccaccccaattctccagctcctcgtccttccatgatccccttaaaatcgccagcccagaactccttggggagatggatttgagggtttcctctcatgtcctcacttggcgccctgtgatcatgaaactctttctctgctgccaaccctgctgtctcagtggaatggtctgtcactgcacagtggatgtgtgagcctgttggtcctataacactgcttcatcagaatgctctgaggctccataccccaggcccaccctgcactggccagctccccctgcccttctccccattgctgtactcccaccctcctccactttcttccctgagagctggctcccagggtctgcagggctcatccaggttggttctgtggccaaggggcatggttccagctcagccccttctgccccttggacttgagaaccagggtctgcagtccacagtggagtaggccttgtgtatgggctctgggtccatacttaggaccttatgaggggcaggtgatggtagaggaagaggctacccctagtgggcatttgattggcaatgggaaggcttagaaaggggtcacaggctggagagcttcatggactgcatcccaccatgaaggaaatggaaacttggcttttccattctcaggttacaagggaagaaactttcatgatggtgttgataaagaatattctgactgaataagttggggccaatttggggttgggtctcagggaaatgaagaggctgtaagagcccaaatctttcccttcacgtggcccccagagtctttaaactctcctacttcttcaaggcccaagccccttccttcaactcatcttggatcacacgtgaacaaagtaacaaacatttattaagaatttgtattcacagcctggcacagtggctcacgcctgtaatcccagcacttcggggaggccgaggctggtggatcacctgaggtcaggagttcgagatcagcctggccaacatggcgaaaccccgtctgtactaaaaatccaaaaaattagccgggcatcgtggcgggcacctgtaatcccagcaacttggaaggctgaggcagagaatcgcttgaacccggggggcagatgttgcagtgagccgagatcatgccattgcactccgacctgggcaacaagagcaaaactctgtctcaaaaaaaaaaaaaaaaaaaaaaaaggatttgtattcacaaaacttcgtgccaggctggatgcagtggctcatacctgtaatgccagcattttgggaggccaaggcgggaggatcgcttgagcccaggaggtggaggctgcagtgagttatgatcaaaccactgcactccactctgggtgacagagcaagatcttatctcaaaaaaacaaaaaatcacccaattctgtgccacagggaaacttttggggactatgaatgcacacatttgctagaagccattgaagtatacactcaaaatgagtacattgtgtgtgtaaattatacctcaataagttgatttaaaaaaactgcatcagaagattggcaagaatattggtaattgtcaaagctggatgatggacacgtggcagctcattatgcttttctctctacttttgagaatgtttaaatttttcataataaaaaaataaatttattctgtgctaatacatttagttctgggaagcaaagtgtcattgggtatgtaagagtcacactttaattcttccatgtcacaagcaattcactgagcaccagccttgtgccaaacattgggctggtacactggaaatcttatgacaaggtcacagcctgcccttgtcccgatggtttgcacagtggagggaaagagaagggcgcttaacaaataattgcccaggtaaatggtgactttcataatccatataaagaagccagatgccatcagatatgatggaagaacccaccttgctctaggcaatcagaaaggctttctagaggaggtggtggttagactgggtgctgaaggatgaataggagagtgagagaaaaatacaggagcatttgttgttattgttgttgttgttttgagacagggtctcattctgcttcccagactggagtgcagtggcactcactatatagtggcactcatagctcaccataaactcgacctattgagctcaagcgatcatcccgcctcagcttccccattagctgagaccacaggtgccctccactatgtccggctaattttttttcttttcttttttgctagtgacggggt[145 bp omitted]tcaatgctatgtgattaattccaagtacttttccctggggaactcttattctaccaggagattccaaatggtggtaaacactttattatgattcaaagcgttaattactataatggaaaaaacctatctcattgggaaccaaggagagaaagaattcttggagagaattattgctgaagtatttacaatggaagttgctgctaaactgggtgttaaaacacagttgatgttcgctaggtgcaccaaaggtctgcatgaagcagaagtgctccagctgttcaaaacctcaaatgagcactttgttccaggaagaaagacaagggcctgaaactggactttggaaagcgggtggatttgtagaggaaggaagagcattgcaggaaggtggatcgcacaggttttaaggggtaccttctggtggtgtgtgagagacagagtgagtggagctgagggagcaccctgaagagcagggggatatttggctgggtgtttagctagggtagggtcaacacggaacccttcgatgccaagatgaggaggttggaaaggaccctgacaatgggacctcactcccagttgcattcccctatcactgcctcaactttaggtgtgtggaagagcagaccctggtggcctttcagtaccaagagtcatctttggtcaaaattgctgaggatcaggtctgactaggagcacctagtctggctggaggcagaggtggccaggagccgagcaccaggggagagagagctctcagcatgatgaggagagcaccatccagtttacatatttctttctggaggaatcttcaagttctcccaacttgattcaggacaggtgacccccaaactggggcttagcatgtgagggttcttggctttgctcaagaaagaattcaagggtgagcagtatgggccagtggtagggtagaagaaaagaggctcattgaagaagccgtgttacagctccatgactgctcctgcagagcaggactacccggtcccgtaggcagacagcagcagctcagagcagttctgcagtcagatttatgctcacatttaattgcacgtagattaaggggcagtttatgcagacatttctagggaaggggtagtagctttggggtcattatatcattgccatggaaaggggtggtgactctccggtgttgccatggcaatggtaaactgacatggcgcactggtgggtgtgtcttatggaaaactgcttccctcccgtccctgttttagctagttctcagtttggtcaggtgtctgagcctcacctctggagttgagcccacctcctacctcacgggtgtactgcagccagtgagtgtcattgagtccctgcatataacaaacagactccgagatctgccttcacccagtggcagttcatgaccttttggacatggtgcatagatagtgatagaatagaaaggcagtaacgtcatccactatgcattgtcttcgttctaatcacaaaataagtgtttgaaaaattaagcattatattttcaggtgcctttcaaattctagacccagcgtacatacatacatacatacatacatatatatattatgcataacacatctatgtgccgtatttactttttttttttttgagatgaagtctcactctgttgcccaggctggagtgcagtggcgccatctcggctcattgcaagctccgcctcccaggttcaagtgattctcctgcctcagccacccgagtagctaggcatgtgccaccctgcccagctaatttttgtatttttagtagagatggggtttccccatgttggccaggctggtcttgatctcctgaccagcctcccaaagtgctaggattacagcatgagccactgcgcccagcctttatttactttataactgtacttaccttatgtaatgagtatatatgaagtagtgctaaaatatacatatttaacatttaaatatcatgcagcattaaaagacatggctgggtccagtggctcccatctgtaattccagcactttgggagaccggcaggcagacggaatgaacccagggttttgagaccagcctgggcaagatggtgagactccatgcctacaaacaatacaaaaattagccaggcatggtggcatgtgcctgtagtcccagctactcaagaggctggggtgggaggatggcttgggcatggaagaccaaggctgcagtgagctgggatggcatcattgcactccagcctgggtgacagagcaagaccctgtcacaaaaaataaataaataaacaaacaaacaataaaagacatataaataaataactgtcctctaccttgcatccacatcccataatcaatcattttcgtcttttggctcttctattattgctttatgttgctgaataatttgcatattctaatatctcttttgcattttaatcagtattattgaaggatagtttatatacaataaaatgtgtctcttttttgttacttatcgttttgaaacacctgtattccacatgtgtttattaggtgtttacgatgctctaaaagtgcattacaaataagtcatcaaaccactagcttagcaaattcacacaggcatgtcagcagtggggaaaataaaacaattaattataatgtcccattaataatatcctgtaaatatcaaacacaacgcattttttttctttgtcctcattgcaaactatactgcctaggccatccgtaaacaaaaatttttgtgtgtattataagtatttccatcagtttgggattcttaaactcaaaattcttggctctaccagttgcaaacttttaaaattttaattctaatcagtcatataaatgcacaatagcaaaagtcaaagaattcaacaagatttctaaacccagcagctctcttctctactccatgccgtcccaccccatccccctctccagaattagccactctctcttttagtgcatagttctattttcatctccttttttttttttttttgagttggaatttcactctgttgcccaggctgtagtgcagcagtgccatctccgctcactgcaacctctgccgcccgggttcaagcaattctccagcctcagcctctcaagtaactgggattacaggcatgcaccgccacaccaggctaatttttgtatttttagtagagacagggtttcaccgtgttggccaggctggtctcgaactcctgacctcaagtgatccgcccatctcagcctcccaaagtgctggaattgcaggcatgagccactgtgcccggctccacgtttataaatagcaggtttatatacagtcttgaatttgaatgttatatattatcaacttactttttactagaagatgatgaattcgctcttttcactcctctcccacacacatatttccttccccccccttcaatcctcccagaattgtcatgtcatgatttttattaagttcactgattatgttatggagatcaggaaaatgttagagatgagctatgtcgtgcgctgtccttacatttctttctcatgcaaactttttgcttttctttacaactgtagttgagatttgtccttttctctgctttgaataatttaaactccaatctctgtccttctgctccaatctatactttcttcaagccagctgcatgattctcctgctgggacttcacttcaccatctagtcatgttggtcctccattttctctttcctggtttactcccttgtttagggtgaaaatatcttccaggagcttcctgagaaagactgtttgggaggaaactttttgagactttgtttgtctgaaaatgtctaaccctgtttccacttgagtgataatttgatagaagtccaggttaaacagcagtttttccccagagtgtccaatgtcctcccacctgtgatcctttgactgtgatctgtttggctttttttttttctctctctggaaacctctagaactgatgttctgaaatattattaccatattttaacaattgtggagcactctgcaggctcttcaaatttctttcagttatggggacatttctttaatactttcttcactactggagtttctgttttctcttttttggaatttctgaatttatcctctaattttcttatattgtctcttattatccacttttgtcttttattctgctttccagaagttttccttttagtttgtcattgttttttagagacaaattctcagcggctgggcacggtggctcatgcctgtaatcccagcactttgggaggccgaggcgggcggatcacaaggtcaggagatcgagaccatcctggctaacgcggtgaaaccccttctctactaaaaatacaaaaaattagccaggcgtggtggtgggcacctgtggtcccagctactcggaaggctgaggcaggagaatggcgtgaacccgggaggcggagcttgcagtgagccgagattgagccactgcactccagcctgggcgtcacagagagactccatctcaaaaaaaaaaaaaaaaaaagagacaaattctcgctctgtcactcaggctggagtgcagtggcactatcatagcccactgcagcctcaaactccggggctcaagcaatcctcctgcctcagcctcccaagtagctaggactgcaggcttgtaccacttgtaccaccatgccctgttaattttttaatagagatagggtttcactatgttgcccaggctgatctcaaactcctggtcttaagagatcctcccactttggtccccagtgtggtggtgttgggtgacgggacttttaagaggtgatttggtcattaagagagactgatgccattctctcgagactgggttaattctggaggcagtgagttctcactcttttgggactggattggttattgcaagggcaggctgttataaagtgaggttccccttaagttttgcccctttgacacacacctgcttctcttctgcttttccatcatgttatgatgcagcactagcccctcccccgaagccaaccagatgccacccactcggtattggacttttcagcctccagaaccatgagctaaataaatttctgttcactataaattacccagtctgtaatttatagtggtatattctgttataccaacaaaaaatggactaaaacaatcactgtccgtttagatttacccacacatttatcattttcattgcttgttattccatcttacagctcatattttccctctgatattgcttttctttcttctgacctaattttttaagaatttcctttagggggatatgttcatacaaaatatttcagtttttctctgaaagtgtattcagttcatcttcatccttgaatgattcttgggcctgcagttctagatggacatgtgttttctcccagcacatcaaagctattgttccattgtcttctcgttcccatttttgctattgagaaatcagtagaaagtctaattttgttttcatatatgtaatccatcctttatttccagccacttttaagattatgtcattttctttggtattctgtggtttctaggtatgctttttaaattattctttaaaaactgaatcgaggctgggcgtggtggctcactcctgtaatcctaatactttgggagaccaaggtaggtggatcacctgaggtcaggagtttgagaccagtctggccaacatggtgaaaccctgtctctattaaaaatacaaaaattagccaggtgtggtggcacatgcctgtagtcccagctactcaggaggctgagacaggagaatcgcctgaacccaggaggcggaggctgcagtgagccgagatcatgccactgcatggcattttcttcatctgatttttttttttttttgagacagagtcttgctctgtcaccctggctggagtacagtggcatgaccttggctgactgcaacctccacctccggggttcaagcccttcttgttcttcagccttctgagtagctgggattacaggcatgcaccaccacatctggctaatttttgtatttttagtagagacggtttcacatgttggccaggctagtctcgaactcctgacctcaagtgatccacccgccctggcctcccaaagtgctgggattataggtgtgagccactgtgcctggcctctgaattttttttaatgttgcttttatcctttttcttttgataactttgttcagtttctttgaataccctttcttctctatctttttaatgaaactttccaaacacagaaaagtcgaaagaactatgcagcaaatagctgtatacataccacctatgcccttaacatttcactgtacttgctctatatgacttttttatgtgtctaaagtgagttgcagacatcaggttcccacccctaaatctgccggttatgcatttctcttttagctacctttgacttggggggaactcttcctgtgccaagtaattgaagacatttgtgcacagtagggggaagcttttgtttctgcctagcaggaagcatttccagtttccaggaacgttgctaatttagaggaatatgtgtatgtgtgagttgcttaaacttcctttgccccagatggccaagaacagcatccggaaagccacttacagtgcagcagctcagccccacctcctcctggcaagcaggcagcatcctgtccagacaactgtgtgttgatccctcctccagcactgctttcctggccccagacatcaatggcagcaagtgccaggaaggttccaacggccaggctgtatctctcactctttgtgttccaaacaggtgactgctggtttgcccatcacaacgagcctcttgtgccttgtaggcttagtctaagatcagaaccatgggcactccttcttggcttcctcctcgactcacttgacttttcctgtgttggtagctcttcctcctctgacctttcagataccccctagttatgccagaagtgcagagtgcatttatgtttctgaatcctccttgctggtctggtgtaattcctgaaagaaggcatactgcagtaattttacttatgattctttttgcaactagcaagatcaaccagatatttatttattttcattttttagaaaattttaatataattttaatgttgtagggagcatggggaatatggagaagggcaggaagagacttttgtgggtgatgttggttagcttgattgtggtggtgatttcatggatatatacaaatgtcaatatcaaagataaaaattgtataatttaaatatgtgcagtgtatcatatatcaattatacttcaataagcctgttaaaatagttttaacaatgatgatatattgcaacttttatgtattttaaactaattgagtttttatacatgaaattgtacatgtaattgagtttaaaatacgtaaaattttaatgacaagttaaattttataacatacattcagtaaagtgcataaatcttaaatgcatagtataattaatttttcatatgactaccactaccactcagatgaaaatatagaatactggctggaagcaaatggctcatacctgtaatcccagcattttgggagaccaaagcaggaggatcccgtgtggccaggtatttgagaccagcctaggcaacatagcgagaccccatctccacaaaaaataaaaagtaaaaatattagccatatgtggtggcacatacctgcagtcccagctactcgggaggctgaaatgagaagatcagttgagtctgggaggttggggttacagtgagttatgattgtgtcacttcattccagcctgggctacagagcaagaccctgtctctaaaagaataaaaaaaaatatagaatacttccaacacttcagaagatccctcgcgccctcctagtcattatcccctgagggtaagcactattctgacctccatcaccatggattggtttcgcctgttcttgaactttatattaatggagatgcattcacgctgatacttgcggcaatagtttgctcattttcgttgccatatagtattccactgtatgaatatatcacaatttatttattcattctctttttgatggacattagggttgtttcaaggttttggctgttatggataaagctggtatgatcattcttattcaggacctttaatggacatttgtggtctttttacttgagtgttgtagtaagtagtataatagccccccaaaagatatgtccacatcccaaccctcggaacctgtgacagtgactttatttggaaaaggagtctttgtacatgtaattttttttttttttgagatggagtctcactctgttgcccaggctggagtgtggtggtgcaatctcggctcactgcaacctctgcctcctgagttcaagcaattctcctgccttagcctcccaagtagctgggattacaggcatgcaccaccacacccagctaatttttttttttttttttttttgtagagatgggatttcaccatgttggccagccttcaccatgttggtcaggctagtctccaattcctgacctcaggtgatctgcccacctcggcttcccaaagtgctgggattgtgggtgtgagccaccgcacacagcttgtacatgtaattaaattaaggatctcaagataagatcagcttgtattatctgagtgggctgtaaatccaatgacaagggtccttgtaagagacacagggagtaggagaaggccatgtggagacagaggcaaagatgagggttatgcagccccaagctaaggactgtttagagccaacagaagctggaagaggcagggaaggattagagccttcagagggaacatggcgcggctgacaccttgactttggccttctggtctctagaacactgagataataattctgttgtttcaagccacaaagtttgggatcatttgtgacggcagccaaaggaaattaataatacaaaagttcactttattaatactcatttatatttgtttgtgatgtgcacaacactccaatggaaattttaaaaagtgtttggagtacagactttcccaagcctggctaactttttcttccttctctgggaatggatgttttgcgcagtgtacagaagtgtggagagtgaccccaatgtccttgttgatgtgtgtctgtaaatcttacctgtcacagtgtgggcactctgagagccctgtgtccccaccagaagcatctgttccttatgcagcctgagtgtcctctgctagggtggccagttcccctcctcctgccctgcctttttgcaggttcacaggtgcaagactggctgtttcctgttaatattaactatacttgaattttcaaggatttttttaagaaaaaaatatataatgccaatacaaaaaaaaacacaggaaaaaaaattaaccttactaaactaaacctgccctgataggagggttcttctcacaaacctgactgcagagcaaaatggaattgctccaatttctccctttgcaaacaggcatgcatcaacttctcattttaacaactttctttctttctctttcttctttctttctttctctctctctctttctttttttcttttttttttttcagacagtcttgctctgtcacccaggctggaagtgtagtggtgcgatcttggctcactgcagcctccatctcctgggttcaagggattctcctgcctcagcctcctgagtagctgggactacaggtgcacgccatcacacccagctaattttttgtatttttagtagagagggggtttcaccatgtgggccaggctggtcttgaactcctggcctcaagtgatccacccgccttagcctcccaaagtgctgggattacaggcatgagccactgtgcccagcctttaacgactttcttaataagtggtgtgggaaaacacccagagctaaacaaaaccaacatggggaagtgacaagcatttgagaattcttacatttctcatagctgtattcccccagaatctggtatccagctttttttttttttagtctggagacaggttggagtgcagtggtgtgatcagggcttactgcagccttgccctcatgggctcaagcaatctgcctgcctcagcctcccaagtagatgggtccacaggcatgtgccatcagcctggttaaattttctattttttttggtgaagatgaggtcttgttatgttgtccaggctggtctcaaactcctgggctcaagcaatcctcctgcctctgcctcccaaagtgcagagacgataggcaggagccattccagcatctcatatgatgtggttgttgaaatcgactctctcgggaacatttaacaatagctaaaacagttgagtgggcactgggtgtgtgcttcagctcaggctcttacttatattgttagattccctcaaaatccctggaggtggggaatttccttgaggtgggggttttccacgctttccagatgagggctgtacgctcattgactagaggcaccgtgtctaagtgtctgaggcttaattcccattctctagaagagcagctgactatgtgtatgtcagtgggaaaggggagagcccagaaaatcattgcagtttatcacagccacccccaccccctccatcactgcagaaactgagcctccactatcttggagtttccttgaagagttcccagtcttggtgaaatatgggatggacggccaggcacagtggctcacgcctgtgatcccagcactttgggaggccaaggtgggtggatcactttaggtcaggagtccgagaccagcctgaccaacatggtgaaaccccatctctactaaaaatacaaaaattagccaggcgtggtggcgcatgcctgtaatcccagctactcgggagactgacgtaggagaatctcttgaacccaggaggtggagcttgcagtgagctgagattgcgccactgcattccatcctgggcaacagagcgagactctgtctcaaaaataataataataataataataataataagaaatatgggatggaatttccattggatgttaaagatccttccaaaataggtattttccacagaaaatgttatatttggtctgacaactccttgcaaaaatgaactcaaatggtcaggaatatttgttgctctaggttttcagaagcagaatgggcatcctttcttagaatacattctgggcccctcagggtgttcagggtgggaataaagtatataaaatgagaagtcaaaacagggaagaggtactaggggggaagctgggcagaggaaaggaacccttgggaggcccaaactttaatgctctggttcataaaatgcaaaaaaaaaaaaaaatccattctcatccctcctgtcctgttattgtcaagatgctagctccttggacaattcaggatacaccaagctttctccccggatagccgcaagtttaagggcaggaaatggccttggactgggtgcctttgctgagagaacagcagcactttgatccaagatgtccaaaagacaaagcagaagttcatgagaaacagaggccccagcatcacttggggtggcggggagggacctgtgcagcttgcgccatggacacctcgttagtgcataggagtgcatcagttttacagaaacggggctccatctagcccaaagggagaacgcccaggctgtgatcaaaggattgagggtaggacatcaaaggttagggactttcccgagtggaaaatatgggaagggattgggtcaaaaccttacagagaatgtgggcgagatttggtaagacgtcaaaacttaaccagacccaagtgggcatatttaggggaaaaccagaagtcatagttcattggaaacagacagatacggtcaacaaatcttcatgtatctggggagtgcaaatatcacgttattccttattgtgtgtcagaaatacgcaagcccacactgtgttgagtacctgcgtgggagtgggagatgttcaggcctgcacacgacctatctgtgcctcagctcttcttgtggaaaagtgctatagaaacagcacaagatctggaccatccaactcaccaacccaccccagctggaattcagtaggcagtcccctgaccctgttattcctctgaatatgagaaaggcagagataacagaataggagggcgatggtttcaatccacagggctctttggatgagaaaacatgggggtgttgttaggtagccctggtctgcttgatatttcatttctggccaggcgcagtggcacatgcctgtaatcctggcactttgggaggctgaggcaggtggatcacttgaggtcaggagttcgagagtagcctggccaacatggtgaaaccccacctctgccaaaaatacaaaaattagctatgtatggtggtgcacgcctgtaatcccagctacttgggaggctgagacaggaaaatcacttgaacccgcgaggcagaggctgcagtgagctgagattgcgccactgtgacaggcgtgggccatagcacagagcctggtaaccaccattctattctctgtttctatgtatttgagtttttttcaggttccacatataaatgagatcatgcagtatttgtccttctgtgtctggcttagttcacttagcataacatcctccagattcatccaaatggcagggtctcctcctttttgaaggctgtatagtattctgttgtattgtataccaagtacctttatctattcatcactgatggacacttaaggtgtttctatgtcttggctacggtgaataatgccacaatgaacctagtccaaaatgggaagtcctcaaatatccatcaatgttaaatcattaagtaaatagtggtatttattcacaatttatttcataggtggaatgctacacaatggtaaaaatgaacaaagtttagccatacacaataaggcggatgattcacaaccacaatggtaaatcagaacagctgggccgggcacagtggctcacaccagtaatctttgggaggctgaggtgggaggattgcttgagcccaggagttcgagaccagcctgggcaacatagcaagaccctgtctttttaaaaaatacaaaaattaggcagatgtagaagcacaccaggtacttgagaggcttaggtcggaggattgcttgagtgcaggagttcgaggctgcagtgagctgtgatggtgccactgcactcaggcctgagcaacagggcaaaaccctgtttcaaaaaacaaaaaaggaagaagaagaaccctaaacaaaagaattctaagtgtatcgttctatttgtatgatgttcagaaactggcaaaacgagagcttttgggaatacgcactcaagtagtaaaactctaaagaaaagcaaaggggctgggcgtagtggctgatgcctgtaatctcagcactttgggaggccaaggcgggtggatcccttgaggcaggagttcgagaccagcctggccaacatggtgaaaccccgcctctactaaaaatacaaaaattagcggggcgtggtggcacgcacctgtaatctcagctactcaggaggctgaggcaggagaatcacttgaacctgggagatggaggttgcagtgagccgagattgtgccactgcactccaacctgggtgacagagctagactctgcccacccactcccgaaaaaaagcaaaggaagggaagagggcagtgcttgtcttcaggaggaagagggtttggtgggaagacacttgtggtgtctaggggtgctgaccgcatgctttttcttgatctcagtagcggttgcaaggtgtatactttataattacatattaagctgtgcattcatattttagtcccttttctgcgtgtatcatctgtcataaaaaggttttaaaaaacatgaagcaacaaagaaaaaattgctgatggacacttatgtgtcttcacacaagatatgaaagaactttacaagaaaaacttaaaaaaagaaatagagatgggatctcaccatcttgcccaggctggtctcgaactcctgggctcaagcagtcctccgacctcagcctcccaaagtcctaggattacaggtgtgaaccacagtgaccggcacccccacc[143 bp omitted]tgaaaccccatctctactaaaaatacaaaaaattagctgggtgtgatggtgggcgcctgtagtcccagctactcaggaggctgaggcaggaggattgcttgagtccaggagttggaggctacaatgagtatgacggcagcctgggatagtgcaaccctgtctctaataaataataaaattaaataaaaaaataaaaatgtaagggaatgataaccatcaaacaaagggcaacggagacttctgaaaggaagacaaaagtggaatggggaggggcccaaggcagtcacagggtactccctggtaatgtgctgattctcaaactgagttggtggatggagttagggggtcgttttattgttctacaccccatatcttataacattttactgttatacattataacccacatctacgggtatatgtcaattctcatataataaaactggcacagtggctcatgcctgcaatcccaccacttttggaggccgaggtgggaggatcacttgaggtcaggagtttgggaccagcctggccaacatggtgaaaccccgtttctactaaaaaaattagccaggcatggtgatgcatgcctgtaatcccagctacttgggaggctgaagccaaagaattgcttgaacctgggcagtagaggttgcagtgaactgagatcgtgacattgcactccagccgggcaacagagcgagagtccatcccagaaaaaaacaaaacaaaacaaaaaaccaaaaaaaaaactggaaaagtaagagaaaagttcccagacctcagccttggggaatactaccagctttcacggaccagggagaggggcaggagttgtgcacgaaacgagatggagctgcatgaggtgggagaagaggaaaccgtgacatcgcagcggccaagggagccttccaggaggaagaagcgtctcccagggtcagggcttctaagagcagttggggaagacgaggactggaatttggatttggccacctgggggtgttttctgaacttggaggagcattcttgtgcccctacgatgcttgcagcagctaaggactccagacctgcagagtctgtcctgagacaggtcagacctcggcggtgggacgggaaaggggaactctctgtctagagacttgcgctccgatgtagttggaggtgctacactgtggctggccacagaccaacacgagcaatggaccacgagaggcctggggtagttagcctttccttcctgtgcagccaagaacggaaggatgagaggggttctttctgcctcctccttggcatgagcacctccacctccatgcccactctgtcctttctcccaggagcagctggccggagagtaacacgactccagccggacatggtcatgactatttcagcctgcaaggtcatgactctctggcccacctaggactcctaggggaaaggaagtgcctggtctaccgcccttcccctgcaagtctgaatgctgtgtggacagaggaggaggacccaataaggtaggggtattggagtactcgggtgcctgggaagatccaagcccggcctatagggtcaaggtcttttccaaaacaggggaaaccctttctggttcccgaaggtcctcccttccctattcgctgaacaggtgggtgccaagaagcccctgtcttgaggacagagagactgcggtctggcctccccagacccaggcagcctctaacatcacagccacagagcagaaactggcctggcttcctcccaggcccagaaggccccagctggccacctccctttgtttgtcttgggaggggcaactgctaagcaaacagggaaggggaatcccgattcggcctctctgtctgtccggctagccgttacccaggcccgggctctggtgcccactgaggcctggctccttcctgaccctttgtgtggaagggacacagggcaggagtgggtacagagaacacccagggctttccgaaaaaaatagcccaggcctcccacagatgagagaggagctatgtggttcggtaaacctcagttccagctacaggcaaatgggattaactgagcacttactgtgttggggccctggcctagccccatgcatgccagagccctccagatactgcctggccaccctgcagggtcctatcagatctcgagtctccaaaagaggaaacaggcttggggtcataagggaatgaggttagcaggggtggtaatcccacccagatctctctgactctcagatcacgggttttttttttttttttttttttttttctgagacagggtctcgctctgttgcccaggctggagtgcaatggcacaatcatagctcactgcagcctcaaattccgggattctcatgtgatcctaccgcctcagcctcccgagtagccagggctatagggacgtgccaccatgcctagctaatttttaactttttgtagagataaggtcttgctatgctgcccagactggtctcaaactcctggcttcaagtgatccttctgcctcagcctcccagagagctgggattacaagcatgagccactgcgcctggtccccaactgtgctcttaatcatagctcatttctcttagtggagccacgggggaaggtggtaagggggcttaagcgggagctctatccctcatctcttttttctctttcccagagaccacaccgctgttccagaccctctccatggatgatgtcctgcccctgatgccttgggagaccctgttggcacagggcagtccccagggctcgcctgacctcccagcagggcagcggaagcagcagccacagggtgacagggcccagggcctggcctctgagtcctggaagctcctggaggtgcccatcattcacataacgccatccagtgatggggagtcccccgcctgcaccccaaccccccgacgccggcagcagcagaggatgccagacccgcagagtctgtcccaggacaggtcagacctgggcagtgggacaggaaagagggtctctctgtctagggagggttctctctgtcaagggtgggttccttgtggctgcgggtcagagcacaaccttagccccacagagggctgactcaaagccacgaaacagatgcacaaacaaaaggtaaaaactgagggtgtgcgttgggacaaccagctatga[137 bp omitted]catggtaaaaccccatcttgactaaaaacacaaaattagccagcgatggtgatggatgcctgtaatccaagctattcaggaggctggggcaggcggtttgcttgaacctggtaggcggaggttgcagtgagccgagattgcgccactgctccagcctgggcgtcagagcaagactctgtctcaaaaaaaaaaaaaaaaaagagtggatgggtggagagggaccccacccagtgtttttcaaactgtaggtcaagacccatttaagggccataaaactaatacagtgaattgcaatcagcccttgttttttgttttttgtctttttctttttgagacagcatctctctgtcacccaggctgaagtgcagtggcatgatcttggctcactgcaacttccattgctcccccctccacccagcagctgggaccacagatgtgcaccaccacacctgtctattttttttgtatttttagtagagacgaggtctgaccatgttgcccaggctggtcttgaactcctgagctcaggtgatgcaccctcctcggcctcccaaagtgctgggattgtgagatgaggcacccggccgcaatcagcacttctttatccaaatcaaaataaaatagaattgcaaataacaccatgcgtgaggcctaatgagggtaagtgtggtttcttacaacttctgtggcattatgtgtatttctaagtgcgtgctggaagcccatgtgaaaggtatttcctgctgtagatcacaggccaaaaaaacaaaaaaaaaaaaaaaagaagaagaagaaaaacaaagaaaaaaagaaagtttaaacaaaacttctgaaaagaaacactatctctggtacaaggagacaggaaatgggaggttcagggccatagggggaagaggaaagaactctaccgaccctgaatagaacaagcagccactgtggtttcttccaacaagggacactccataagcgttaaagtttaggaagcagagctttgtgcatggatgtggagaaatcgcagaaacaatgataatgggggacagcaagttgcaaatgaaacagagggagcctaatcgtgtatctttttaaaaagatactggataataggtgatagtgttggtggatgcctcctgatgtagaaaaaggacagaaaagtacacagggtccaggcgtgctggctcatgcctgtaatcccagcactttgggaggccgaggcgggcagattaacctgagatcaggagttcaagaccatcctgaccaacacagtgaaaccccatctctactaaaaatacaaaaattagccaggcatggtggcgcatgcctgtaatcccagctattcaggaagttggggcaagagaatcgcttgaaccgaggaggtggaggctgcagtgagccaagatcgagccactgcaccactccagcctgagcgacagagcaagaccttgtctcaaaaaaaaaaaaaaaaaaaagcgcaggaaggaaacacaccaactgcatggcaggcagaaggctccttggggggcacgggaagggaaaggagggatggggagccaggcctttggttgtaagtgtaatcatttatttcttttaaaaaaaggacctgaagcaaaatggcaaaatgtccacatctattctatataggtacaggggacatagaggactgttatattttcttcctttttttttttttttttttttttgagatggagtcttgctctgttgtccaggctggagcgcagtggtgcgatcctggctcactgcaacttccacctcccgggttcaagcaattctcctgcctcagcttcctgggtagctgggattacaggtgcaagccactacacctggctaatttttttgtatttttgatagagatggggtttcact[131 bp omitted]cattacactagaagaaacagaccaaagagaaatctaaagagatcagttggacagaggaaggtggtgggaggagggcctctcttccattggccggtgggaggcagcaaatgtcagatggtggatgggggttttagaggtgggggttagcatgagaggtagggcacggcgatagggggggtgctgtccatgcagagggaataaccagtgcaaaggtcttggggtaggaggcaggaaggtgcctggtgagttagaagaacagcgggtaggctggatggggggtgtgagccagggggagatgaggagctgaagtcagagagctgacaggggccttgggtgccaaggtgaggactttgcttttacctggagtgaggtacagctggggcagggctctgagccaggagggtagttaactgactcaggtggtcccaggctctctctggctgcaggtgagaacagacagtaggggcagggatgggagcagggagatcaggcaggagaggatggaggctgggccagggcgtgggcagcggaggaagaagagtttagaatggagcgattgattttatacgtggagcccacagtttgtgacggattggatgtggtgtgaaggaaaagagagggtcagaaaagactctgaagttctgggcctgccattcatcaaaatggagaagtcaggtgggcttcttttgcaggaggaggggaagggttgatggagagggttgggaagggagttttttcaaaagaggcggggacagcgtaccctggagagcgctggggagccacagccccggagctgtgaggtgggactcgcatttctgtgtggttgggccaggagtccaggacaccacctgactctgacctcttgcagacggggcgggggaggggggacgcaggttatggcgtcagagcaggatcgaatccaactctgccgcctacctaccaggtgaccccaacaagtcacttcccatcttagaggccgggcttctccttccgtaaaaggactgattttgcccgttcctgcgctgtccccgggaaaagcccttaccaccgagttagtgggactcccagcactggggtgatgagcgcaaggtctcagcacagataagagccagggaggctggattctgacttggtacttggcctggctgaccaaaactgggaagtccctagaaacggaggcaccggacctcctgggaccaggaacccgggctcagagactgggagagggaaggaggaggcggccaaccggccccaccccttcccgccagcttcaggccccctcccccatacatacacctcggtttcccagcatctccagtcctcccccaccttcgccccggctctcaggttcctccctgggaggtccaggagcttctggccaggggcatagtagttgctagggacccttttctaggtactaggggagggggctccccaacctgcgggcaggcagctgcctccacgatgtttggttttaataaagtctctttgtttccttctctgtctctctgcccctctgctttcccttctctgtccagtccctctctccccggcttctccctccttctaggcctctgcggcccctccccgccttccctcccgggctgggggcggcgccgtgacgcggcggggcgggggaaggaagggggtgtcgctgacgccgcggcggcctccggcggctccggccttttgtgcgggcggttgggtcgggtgggggcggcggccgcggaaggccaggccggtgccctgcggggacgcccagcgcagcccagccccgcgcagcccagccctgccctgccctgccctgccctgcgcccggggcgcgcccaccgcgccgcatccatgttcgagtaaggaccgggcgactagagctcagggaccgggcgcgcgggggaggccaccggagggagggggcgccgcgggcttggggagggggcggagcggccgctgcagaggtcgggggcctctgcacatggctctggccggggcgatcggggtgggggcggggcagggggcccccgggcgaggggtgcagctggggagtggggcgcggacgcagggcagggcccggggtctgggtcgccactgccggcccgcgacgcactgggttgcggggtttggctgggggcccgcgggttcatctggcggggagggccctcaggcctggcaaccccctgcctggtaagccaggggtgagcgcgaggccgaactggggctccggcctgggatggagacaggatcgggaccagcccaggcccacaggccgcggagccctgggcgcgccgggagtaggcagccccctcctgcctgggccccctcccaccgtccttggctgttgcgggtctcggggctgccgggggtgggggcttcctgcgtctctccaggaccgcgtgcttgaggtcatggagggcggggggtcctgtgtgctcggaattgacttcttactccccttccggtccaggtgggcgcatgtgcttccgactgtgaattgtcttgcaagtgtgtgtacgtgtgtctggggctgctagcctgcagcagctttgggcctctgatagagttcctgcgtgtaacttaaccactaattctgaccgcggctctgtgtgtcactgtaagttacctgtgtgtgtctggggctccaaatctgtggctgtgagcagctggttgtgtgcgtgttgtgtctcattccatctgtagctccctgtgcaaatataaattacccctgtgtgtctgagtgtgacgttggagtgtttgtacatgtgtctggagttaccgtgtgtagcagctctgatccttcttgggctgtgtgtgttttaccattaattctatctgtagctccaagcgttgctgtaagttaccagtgtgcgtcccattgtgacttagtggtgtgtgtacaagtgtgcctggggctctgggttctaccatgaccctctgtgcctgcatatgcctgtaatttagctctgaaacgctcttctttttttttttttcttttgaaatagagtctggctctgtcgcccaggctagagtgcagtggcacgatctcggcccactgcaacctcctcctgctgggttcaagcaattctcctgcctcagcctcctgagtagctgggattacaggcgtgtgccaccacgcctggctaagttttgtatttttagtagagatggggtttcaccatgttggccaggctgatctcgaactcctgacctcaggtgatccacccacctcggcctcccaaagtgctgggattacaggcttaagccatcgcgcctggcttgaaactctcatttagctctgtgtgccaatgtaagttacatttgtgacattgttgtgtgtctggggctctgtgagtgtggctgtaacttaatttgattccatctttgtgtgaacattcccttgtgtattcctttgtgacagtattgagtggtgcctaggcctctctgtgtacagctgagaccctctgtggttttgtgtgtgtgtgaacagtgtgagaccccttgtggctctctgtaggcttggaaccctcccttctaagaccctgggagtacccagggcactttggaggcaataatgataactgacgttgtccacctgttacagttagtatagcatgtgccacgcattattccactacctggccactgtgtcctcgagatccacgccctgctcggctgcattattcccaagtcctgcttgactgtgagcatcagggctctccaccagctacagccactgacacctccaccccttgccactttactttttcttttcctttttctctttcttttagacgcagtctcgctctgtcgcccaggctggactgcagtggcacgatctcggctcactgcaacctctgcctcctgggttcaagcgattcttctgcctcagcctccctagtagctgggattacaggtgcgtgccaccacacctggctaatttttgtatttttagtagagatggggtttcaccatgttggccaggctggtctcaaactcctaacctcaggtgatccacccgcctcggcctcccaaagtgctgggattacaggcatcagccactgcgcccagccccttgccactttagaagtagccttttctctgtcttccctgccagatggtgagcccagtgcgggcacgggaacaactcagtggggatgtgttggctgaccgtgggacctgatttacctgggactatgtatgtgtcacctggggtcttttgggactggtctttcactgtatggctgtctttggctctttgctgagacttcctcgtggctatgtgtgtgaatataatttatccgggactttctgtgggttgctgtatgtttctgtgaccctctgcagctctgtgtctgtgtgcacacatgcatgtgtctggataacttttctgggaaattgccatgtgactgtagcagactagcaatgctgcaggtgtgtgtgtgtgtgtgtgtgtgtgtgtgtgtaattactctgtggctctctgtagcatacctatgatgctgttgctctgtgcgtgtgtgtgtgtgtgtgtgtgtgtgtgtgtgtgtgcatatgagagagagagagaggaaagagactccttgcaattgtagggaaatgcagtttacccctgacacctactgtgtgacaatcattgagtttcccttttatgcacacctgtggatgcatccgcccttttctgaccagaggctgctctgggtccactggggcctaggaagttggaggtcaggtgtctgcggaagcaaaacaacatcccttccgagtctcctcgcccctataacagtcccccaggctcctcccttcactctgccttcagctatcctggttgggcagccgcagggtccgcccttgagtacttcctctttgcccagccctggagcaaaaactgggggcgtggtccctgccctgtctgtgtgccttgagcctctcttcaggattccggcccccaggccctgcccctagatctgtggctgcgggaaagtagggcaggtctgtgtttcaggctagagggctgagaaaagcaggcaggggaggatgtggtcctgctgcttaggagtctctccctgctcaccagtgctgtctgggtgaagccaaactcctgactagggtcaccaggcctgtgcacctccgctactccctcagccccactggccacctcactcacactcagacctgccaggctcagtcctgtccctgagcttgatgttctccacctggagtcttctcccagcctttgccacatgtgttctttgtcctcaggtgaacaagtgggctttgttcaggaaggcttttgctgactgttactaaagaaattggttgggcacagtggctcatgcctgtaatcccagcactttgggaggccaaggtgggaggatcacttgaggtcaggagtttgagaccagcctgggcaacatagcaagaccccatcactacaaaaaaactttaaaaatcagctaggcatggtggtgtgagactgtagtcccagctatcagggaagctaaggctggaggatcgcttgagcccaagagttcgggcctggagtgacctgggaggctgaggattgagaattccttgagcccaggagttcggagctgccgttaaccatgattttgccactgtactgcagcctgggtgacagagtgtgaccgtgtctctaaaaaaaatttaaaaagcatctctgcccccctagttgtcccatcccttatctctgtggtcctcaaacttgaatgtgcgtcggaatctctggccccaccccagttctgattcagaaggttgggagtgggtcctggactctgccttttgaacactttccaagtcctgcctgctgctctctggggctcatactgagcagcattgctttatggcgttcaccagtgtctgaggtcgccatccctgctcacttgttttcttactgacggtctatgtttccctgtttcagcgtcaggtccttgcaggcaggggcttgtatgggctttgctcacttccttgtggcgggtgcagggtatttagaggtgaaaggctggagttgagggtcagtcatggaggcgcctaacatcaggcgtagtgcttgtgaggtccctgtcagggtcagcagagcgtcatgggcagtggtgcactgggctggcagccgcgctgtacactccatcttagtccgccagtccctgtgggagggaaagcagcgtagttaaaccaggtgccctccaggtactgggctttgtggatctcacctcacctccatctctgtgcaaccctaggaggtgggcactaattcccatcatacccaagaggaaactgaggcacaggagggttcagacactagctcagggtcacacagaaaggacgcggtggcacttgactggaaggtccttggactgtggggcccacactccaggctgctgccctggagacctgcagggtccaaggagtcgtgcacctgctggaacccaagttctatggggggcggggaaggagggccgatcacccaggccatccccaacagtatgtgctcacggagcacctcctgtacgccaggccctgctctaggtgatggggacactcaacatcgtgggtgggggttgggggtggggagagaaggataagaactagggggaaatactgaaggtcccgggaggcagcagggagacttgctttgcagaaagagagcagggagggggatcgggaggcggggtagggggtgttaaatagggaggtagggaaggtgtccactgagcagagacctgagggaggtgggggagccctgtggatgtggatgtggatgtctgggaggaagggcattttgagcagaggcaccgaccaaggcgggagctgggagagggagtgcagggctgatgagggcagagagggaccacccaggaggaccctgatggactcagatgatcccaggctccctcccactacaggtatgggcagggatgggaacagggagaccagggaggaggctgctgggatggcccaggggaaaagcagtggcctgggccactggctgtttaattattttattcacgtattttattccacaaatttattttacaagtgttacatgagtgcctaccctgcatcctgtcccgcattgtgctggggacagagcagtgacccacagacccgtgaaggacttggacctgtcatcagacagtgacggcccagagtagtccaggatgggagctgcccaggggactgtggggtcacgcatgagccaaagtcctgaaggacaaataaggatttgctaggcaaagaagaactacgatctggacagacagaatggcatatgttaaggcttggaggtaagagagacaactttgagttgccccaggtggtggagggaatcccacctgcaccccagaatacatcaaggcccctaaatgggaatcctgccttgaaataaaccaagcccatggccaggtgcagtggctcacagctgtaatctcctagcactttgggatgctgaggcaggtggattgcctgagctcaggagttcgagaccagcaacgtggtggaaccctgtctctactaaaatacaaaaaattagctgggcatggtggtgggtgcctgtaatcccagctactgcggaggctgaggcaggagaatcacttgaacctgggaggcgcaggttgcactgagctgagatagtgccactgcactccagcctgggtgacagcgcgactctttgtctccaaaaaataaagaaaaaagaaagaaaccaggcccgtatcctatggcaagtggtttgccgctttgagctagtttcctcctctgtaaagcagggatggtgaatcatatcaaaggcaccggcttgagaaataatacggttaatcatacggagagcttgacatatttcctgataaggagtcaacaaagaatgtccttttaaagttcccaacgccatccccacagtccttattacagttcgtgtttgcacagtgaagttgggagtgtcctgtttgttcagtgtctgcctccccaccagaaggctcattccccaagggcaggggccatgtcctgcgggctctactgatgccagctccagccagcgtgcagattattcatttagcctctggtggttattgagcattcactatgtgcctagagttttgggctctagggacccggtggtaaccaagacctgaaggtcacagtctgggtagacagtaaacaaacagtaaacaagcaggacactccagatagcctggggtgtggcgacagaggtgcctgccttaggctggatgatgcggaaggagagcatttgagctgaaggggacagagctggtgatgccggggccatggaaggacattcaggcggagggactacaaatgtggaggccttggcgtgggaatgagattggagagcttagggacaaaagcaggctgggatggccaggggagaggaaggacagggagagggaggacatgaggtcagtgaggttccagggccaaatcaccacaccaaggtgaggtctttgcttttacctggagtgaggtgcacccagggcagggctcagacctgactcagatggtcacaggtctcctctggttgtaggacaccagtgaagaggctgctggggtgtccaggctggaggtgatggaggctggagcagggagaaatgggtataataaaaataacggatgctgggtgcggtggctcacgcctgtaatcccagaattttgggaggccgaggtgggcggataacctgaggtcaggaaggagttcaagaccagcctggccaacatggtgaaaccctgtctctacaaaaaatgcaaaaattagcggggcatgatggcgggtgcctatgatcccagctactggggaggctggggcggaagaatcgcttgaacctgggaggtggaggttgcagtgagtcgagatcatgccattgcactgcagcctgggcgacagagagagaccccatctcaaaaaaataaaaataatagaaatagagctgggtgcagtggctcacacctgtaataccagcactttggtagtgcccaaggtgggaggatcacttgaggtcaggagtttgagaacagcctgggcaacatagctagaccccatctgtacaaaaattttttaaaaataaaaaagctgataacagtggtgtgtacctgcagtcccagctacccgggaggctgaggcaggaggatcacttaagcccgggagctcgaggctgcagtgagccgtgattgtgccactgcactccagcctgagtgacagagcgagaccctatctctaaaaagaaaataaaaataaataatggaaatagattttgaaatgagagatgaagaaaataaagaaattaagaaagatgcttagggttttagctccgacaactgagtggaaagtcgctgttcaataaatatttgttgtatgaatcagtaagttaattttaaaaataggaggtataggccaggcgcggtggctcacacctgtaatcccagcattttgggaggctgaggtgggcagatcacttgaggtcaggagttcaagaccagcctggccaacatagtgaacccccgtctctactaaaaatacaaaaattagccaggcatggtagtgtgatcctgtaatcccagctactcaggaggttgaagcaggagaatctcttgaacccaggaggcgaaggttacagtgagctgagatcacaccactgcactccagcctaggtgacagagtgagagattccgtcttaaaataaaataaaataaaacagcaggtgtctttgagagctcgctatgtgccatgctctgttagaattactttacatgggctgggcacggtggttcatgcctgtaatcccagcattttgggaggctgaggccagaggatcacttgaggccaggattttgagaccagcttgggcaacttaggaagaccccgtctcaaaaaaaattaaagtaggctgggcacggtggctcccacctgtaatcccagcacttgggaggccaaggtgggcagatcatgaggtcaagagtttgagaccagcccagccaacatggttaaaccccatctactaaaaatataaaagctagccatgtgtggtggcaggaacctgtagtcccagctacttgggaggctaaggcaggagaatcagttgaacccaggaggcagagtttgcagtgagccgagatcatgccactgactccagcctgggcaacagagcaagactctgtcacaaaaaataaataaataaaataaagtaagataaaggaagtgctttacatgtcctgatttgtttaagccccaaaacaactggatgaggacatgtatttatcatccctggattactgatgaagtaaccgtagcacagagacgttaaggagcatgttctgagtgtcactgctgggaagagaaacaggatggctgggtggatgggtgtgtattcggggatcaatgggtgggcctctgaaaataggcctgtccccgaatcccagcctgttttttccagttaacacttctcttcctcttcctgcccccagcaccacaccccactctggccggagcacgccaagcagctccccatcgctccggaaacggctgcagctcctgcccccaagccggcccccacctgagccagaaccaggcaccatggtggagaagggatcagatagctcctcagagaagggtggggtgcctgggacccccagcacccagagcctaggcagccggaacttcatccgcaacagcaaggttggtgcaagcccaggtggggtggggagagggctagtgggggctggccggtgatctaggggctcatcctgactcctctccttttctttgcagaagatgcagagctggtacagtgtaagtgtctgggcaaggggcttgctggagggctgggaggaccgggtgctgggccaggagccccaggctgcaacagtcaaggagtgcgtgctgagatggagtgggtgcagacctagggtcacgttctatgctattatttatgtgctgtgtgaccttgggtgagttacttaacctctctgggcctctctctgtccttgagaaacagccccaccttacaaggctgaagggaacattgaatgagtcagtgatgctggtgggtgcttggtacggggcccggcttacataagaaatctgtaaatggcagctgtcattgtggctactggtgtgttgtgtgcgttggaatctgtcagggacttaagagactgagggggttccaggagctttgtggggcagcattgggagtgtgaacccccatccaggttctcacctctcaaacttcctcagatgctgagccccacttataagcagcgtaatgaggacttccggaaactgttcagcaaactccccgaagcagaacgcctcattgtgggtgagtcccggacccccagtcccagctcctagcccagccctgtgactctccgccagcccgcgggcgccggctgagcctcgtgacttgggtgtcctcctgtctctccccgcccctctcagattactcctgcgccctgcagcgtgagatcctgctccagggccgcctctacctctctgagaactggatctgcttctacagcaacatcttccgctgggagaccacggtgagcccgcagcggggcagggtacaggggcgggggcccccatggccaggccccaccccgctcctattgaccctcctgctgtcctcagatctccatccagctgaaggaagtgacatgtctgaagaaggaaaagacggccaagctgatccccaacgccatccagatctgcacggagagcgagaaggtgacggaggacccggtgacgggaccacgcggtcccccgctcagcaggccgcctcccccaaacatgcaaagccccatttgttctgcaccctgagttctctccgagctgtccccttctctctgttctcccggcccaggcgcccatcacccctgacctgatccccgcaccagcctctcctctctttccctgcaacctgttacctcacacagctgctcaggaacagcagaaatagtaaaactcttccatgtatgtggcacctcagccgcccctcccttcgtaagtctccccgatgttgtgtcctgtccctgtcattgtggcctcatgtccgttggttgcaagatggctttctcaccagcggtccaacaagaagggggacaggtgtgggggacacttcccagcagacttctctttgtgttttgttggttaaaagtggatctggccaggtgtagtggctcatgcctgtaaccctagcattttggggaggctgaggcaggaagattgcttgagcccaggaggttgaggctagcctgggcaacatagtgagaccctgtctcttaaaaagcaaaaaattaaccaggtgtggtggcacgcacctgtagtcccagctactcactcaggaggctgagacaggaggatggcttgagcccaggaggttgaggctgcagtgagccgtgatcatgccactgcactccagcctgggtgacaaagccagaccctgtctcaaaaaaaaaaaaaaaaaaaggatcaactgaccattcttagtggcaaaggaggctgggcaagttccctgggctccccccatcacatcccagcccctctgggctgaccctgtctagagatgcatctgtcccctccttggactgggagctccaaggacagggccaggggtcgtctccccatcccagtgattctggaattgtccagggcagggccgggcgcaggacagacgttttgtggaactaatgcaggggtgaattagtggattcatggggccaaagatgtggcgtcagcgcagatgagggtggcgcttccccacctctgtcctggtcgctccccaacctgctcacacctctctctctctctctccctgacagcatttcttcacttcctttggggcccgtgaccgctgcttcctcctcatcttccgcctctggcagaatgcactgcttgaaaaggtgggcctgggtgaggcccgggtggggatggggggtttccagggggaccatggagccagggaccccagaacttgcggagctggaggcagccctggctcttctccatgggcaccaggcccagtgcccctgcagctcctccctgggccccacctgaccccgaagctgagtctctggcaaagggacatgaattggtgtaaaccgtcgtaattcttccctggggctgggaatgattttcaccctgaaggacatccaggttccactggcagcgggggagtgtggatagaggctgggaggtcatcacaggatgccggctatggctggtccacagcacctcagagagccccagccccatcctccggctgagcggcactcacgcgctgccttctcagaggctccgatgtccctggagcaggcaggagtgctgagggtcccattcagcatcctgagagagggacagcgcacagtcaggccctaaggaggacagggcagagccccgggattccagccccatcccctggggcaagtgattgaaccccatctgtcaaatgggggccatccccacttcacagcacccagaattttgcccagaataagtactcagtcatgtcagctcttatgagcagagtagcccagcggttagctccctcgccaccccctctgccccccggctgtagaccagctcccctggggtcacatctcagcactgctacttcctggctggaccccagcatgtcaccttgcacttctcagcaccattgtcttaaaaggatgatgaggttagcacctactttccagatggttttgaagatacagtgagttagtacatctgtaaagtggttagaagaatgcacctagttgaccaggtggcaaatgtctgctgctatcatcacttactgttaactgtcatcactgtcattcagccactctggccatgggtggctgaaagctcaaggctcccgaggacacctgggaaaagattcggggggccacgatggcataggcatgggagactcagccctggagtctggcagggcttgaccaagtcacttggtgaccttgaacacatgactttccctacatgacttccccttcctgggactccgtatgctctgtaaagatgggaacattcatggctgggcacggtggctcatgcctgtaatcccagcactttggtagacgaagacgggcggatcgtggtgcccacgaggtcaggagttcgagaccagcctggccaacatggtgaaaccccgtctctactaaaattgcaaaaattagctgggcgtggtagcacgcacctgtaatcccagctccttgggaagctgaggtaggagaatcgcttgaacccaggagggagaggttgcagtgagctgagatcacaccactgcactccagcctgagcgacagagccagactccatctccaaaaaacaaacaaaaaaagatataaaaaaaatgggaacattctctggccagagtattgtggggacttgggaagcaggaagtttgagtcctgggcgcaggccctggaggggctgtagcaggggattccccgcttgctgaggccaggtctggtgcgggagatcgtggctgcctccttgtggaagccaggggaactgcggaggccgagggctggtggggaatctggcgggccgggctctggctggggtgagatggaggccaaccccaggtcccgcctccccagacgctgagtccccgcgagctctggcacctggtgcatcagtgctacggctcagagctgggcctcaccagtgaggatgaggactatgtctcccccttgcagctgaacggtctggggtgagttggaggtcaaaggaggttgaagggttcgggggagaacaggacggtcggcgtgcagagttcctggagtgctggggggcctgagatggttgtatgacgtctggaggattcaggagggtgtatggggtctcaaggacacagcagtcccgcttcctcccctttcccacaggacccccaaggaagtgggagatgtgatcgccctgagcgacatcacctcctcgggggcagctgaccgcagccaggagccaagcccagtgggttcgcgccgtggccatgtcacgcccaacctttcccgagccagcagcgacgcagaccatggggtgagcggtgggttggaagaggggtgggatactgataggaagagagaggagggctgggggtgcagtgggagaagaacagcctgacagatttggaggggaatggatagggggacaggggaggcctggatggaggaacaggacagggaggggaagacggacatgtgacagggaaagagagacagggaagagaggggacagacagaaaggatgagagacagaagggatgggagatgggtggatagatgaagcagcagacagacagacggacaggacaggtaagaaagcttatggctcaggcatctgagacaagcctggcaggggctgagaggggccctcatctgggtggccccaggctgctcgcagctcagccgtgagccctcggtgcacacaccaccccgggtctgcacaggctctggaatccttgtggccagtgtggacttgggagccctggggctgggatggaggtggccaaggctgcatcgggcctttctccacaggcagaggaggacaaggaggagcaggtagacagccagccagacgcctcctccagccagacagtgaccccggtggctgaacccccgagcacagagcccacccagcctgacgggcccaccaccctgggccccttggatctgctgcccagtgaggagctattgacagacacaagtaactcctcttcatccactggggaggaaggtgaggcaggcgggcccaattcattcgcctccggtacttgcaagcctcgctcagtcttaagcaagaggggatggattcgcccgcagcactgagaatccaggggcaggcgggatggcgttcaggcgctgttgctagaaatctctgtctttactctgttttgaaggcagcatggcagggtgaacacaagcacagactgaaggcagcttgccgcggttcacatcctggtcacaccacttcctgaccatgtcacgtgggcaaattatgtaacttctctgagcttgctttcctcctctgaaaatggggttaacaatgataatacccacttcataggattgttgttaagagactataaatgaggctgggtgtgatggctcacacctgtaatcccagcactttgggaggccaaggtaggaaggattgctagaggccaagagttggagaacagcctgggcagcaaagcaagaccccgttttgtacaaaaaagaaaaaaaagaaaaaactaggtgtggtggtgcacacctatagtaccagctacttggcagaccaaggcaagaggatcacatgaggccaagagtttgagacaagcctgggcaacatagtgagacccctgtctttacaaaaaatttaaaaattagccaggcatggggtcatgcaccctatgtagtctcagctactggggaggctgaggcaggaggatcgcttgagcccaggagttggaggctgcagtgagctatgattgcaccactgcacttcggcctgagcaacagagcgagaccctgtctctaaaacgaacaaagggagagaattaagtgatttcatacatttaaagcacttgggccagttagtaagcattgactattagtatttctattatcattattgtattcattttctctctccactaattttcagctagcctctattcttgtctcttatggggcagagatggcctcagccctgccccagaccagcccaatgagagagagcagcctatttttcctagtgtctacagcggacaccctagggttggctctgattgggccaacttgagagtgtgcctgcccctgaaccaatcactgtggttgatcggatagacctgggccacccactcacccctgaaccaattgctgtgcccctaggttgatgctcccaggaggcgtgctatctggtaatgaatccctgtgatttaaatctcagggcctaggtgtgttctccacccagaaccaagcacagtggctgtctgtctgggcctggagcacgtgcccaccctcaacccatccctgagtcacaggagggctctgtgtcagtgtccagctgtgctccaggaggtggggtccgcccatgcacactacaaggcctgggagtggggaggcgtggcccgcagagggagggaggagtggaggcagtcatcatcctcggctctcctctgtctccagcggacttggctgccctgcttcccgacctctccggccgcctcctcatcaactctgtcttccatgtgggcgctgagcggctccagcagatgctcttctcggactcgcccttcctccagggcttcctacagcagtgcaagttcacaggtcagcgggcgcatgaaggagaggctgaggttacccaggtgcaggggaggggtgaggaagggtagcccaggacaggggaaggcactgctagccagtggggcaaggcgaggtggtgaaaagcaatgtctgtcagaccagaagcagctctgccacttactagctgggtaggcttgggcagagttctgagatgctctgtgcctcagtttctccttctgtataatgggggtatgataatagtacctggcttattggttatcatgagaactaagtgagttcatactagaaaagttcctagagcaataccatatagtaagcgtttaataaatacaagttaagaggctgaggcggggctggtgcggtggttcacacctgtaatcccagcactttgggaggccgaggtgggcagatcactagaggtcaggagtgtgagaccagccagggcaacatggtgaaacctcatctctactaaaaatacaaaaatcagctaggtgtggtggcacacacctatagtcccagctacttgggaggctgaagtgggagaattgcttgaacctcggaggcggaggttgcagtgagctgagatcacactgcactccagcctgggtgacacagccaaactctgtctcaaaaaaacaggggcggggggtggggtgctgggcacagtggctcacgcttataatcccagcgctttgggaggccgaggcaggtggatcacctgaggtcaggagtttgagaccagcctggccaacatggtgaaaccccatctccactaaaaatacaaaaatattttagccaggcatggtggcgagcacctgtaatcccagctactcaggaggctaaggcaggagaatcacttgaactcgggaagcagaggttgcagtgagccaagatcgtgccgttgcgctccagcctgggcgacagagcgagactctgtctcaaaaaaaaaaaaaaaaaaggtgggaggagggccaaggtgggaagttcatgtcagcccagaagttggagaccagcctgggcaacataatgagactcagtctttacaaaaataaaaaaaaaaattagctgagcatgatgctgcccacccgtaatcccagctactctggaggctcaggtgagagaattgcttgaacccaggaggtggaggttgcagtgagccaagatcatgccactgcacctcagcctgggtgacagagagagactccattaaaaaaaaaaatgctcctgaggcctccccagaagccgagcagatgtcggcatcatgcttcctatacagcctgtggaactgtgaacccattaaacctcttttctttataagttactgagcctcaggtatttatagtaatgtaagaatggcctaatacagagctcctcagcctgacacgccagcccttttaggacataagcatagttttgggggccttgtagccccccaacacaaggcaccatcttcctgactgcaggggatactgcatgtctcatcaatacagaaaaagaaacaaagagaaactcccatctgacacgctcctcccctgcttgaatctcttttgtagcctcccaagttccttggctggtcccatgtcaacccttcagcctcacccagagctgtggctgcccctctccatacctggctgccccatcccagcctcaggggacttctctcaatattggcctccagcctcagggcctttactggtatcacgcggcctcctgggctcctctgccccgaccccttccttcctcagttcctccttcaggccttggttttgatttcacatcctcctggcagccttcccttaccttcctcagatcccagatacccccagatactcacagcttctgcccttaactcacaccatgccagtagtgtgtggtttttatttatagatatttcctgttgttctcaagagattctgggtgctaaggacaggagttcatctatcctggtctcccactggcctccaagccctgcataggcctgacagagtggacattaaatttgtgatcattaacacatatttatttatttatttatttatttttgagtcaggttcttgctgtcgccccagctggaatgcagtggcacagtcttgagtcactgtagcctctgccttctgggtttaagccattctcctgcctcagcctcctgagtagccgggattataggcgcccaccgtcacgcccagctaatttttgtatttttagtagagacggggtttcaccgtgttggccaggctggtttcaaactcttgacctcaggtgatcctcctgcctcggcctcccaaatttcccgaagtgctgggattacaggcgtgagccactgtgcccggctgcctcagggagcttttgatcatgctgaaaggcaaagggggagcaagtgagagagagtggaggggaggtgccacacacttaaatgaccagatctcggaagaactcactatcatgaagacagcagcaaaccatgagggatccgcccccatgatccaaacacctctcaccaggccctacctccggcattggggattacaattcaacatgagatttgggtggggacaaatatccaaactataccaaactcagactctgttctaggggtactggggagccatggagtgttctaggcagagaagggatagagtcaggcttggctttaacaagatgcccctggaccagatggggagactgaggccagacactcaagggaaggctggcaggggcactgggcaggcaaagatgggctgaaccaggagtgacgctcaggaggtttggtgaacacacagtgtaggtaaccatctaggggtttgagtagggggtgtccagggcaaggcctaccgctccagtgggagcctggaggaccctgggccacccctgagtgggggcctgggagatgcagcaggtttggggagatgctgaggctgtgtggagctcggtgggttcgaggggtccagggaccttccaggggaaggtgttcaaaagattacaggtccaatgctcagggcagaagccaagacgggtgcagagggggaaactgaggctgcagcagtggaggagatggccctgccccaacagctaaggttttaggctcctggaaggaaggtggggacacagaggagtggtggggattgggacaggtccccagagagacctcccagaaggctgagtctcctgtggcctgtgggcaaaggactggggtgtggcctcctcatgctgctcctccctcctctagacgtgacgctgagcccctggagtggggacagcaagtgccaccagcgccgggtgctgacgtacaccatccccatcagcaacccactgggccccaagagcgcctccgtggtggagacacaggtgggccaggtggggcagccgagtgggtggggcagctgggtgagtggggtggccctgacttctccggctctgtccctgcagacgctgttccggcgcggcccccaggccggcgggtgtgtggtggactccgaggtgctgacgcagggcatcccctaccaggactacttctacactgcccaccgctactgcatcctgggtctggcccggaacaaggcgcggctccggtgagtggtggctgggcccctccacccgatgccctggtggccccagggcctcctgtccactcctcaagtcagcagcagagccttggttcccaccctggtggaggaacagaagcgtggggttcctgaggcccttgtcctccgaatagtggagggtagaggaagagtggccctgggatggctcctcccatctacagagggtgtttgagcctcaagactctgaggatacagcaaagccaggcaatatcacctctctcagggagctcatattctagtggggaattggacaatagagaaatgatcaggaaaatctgcagaacattcactggcagttaggcctatggagaaaaatgaggaaaacacggcaggctaaagaagcagggtgtggaggcttttacacccgacacgctggtcagggaagggcctactgggaaagaaatgtttcaccaagaacctgaaggagctgagagcaactcatttgggacagcaggtgcaaaggccctgaggcaggggtgtgggcaatggctggagtggagtaagattgagtgagtaggagctgagattaaagtggtgaaccggggcccggcacagtggctcacacctgtaatcccagcactttgggaggctgaggcaggagtatcacttgagcccaggagttcaagagtagcctgggtaacgtacggaagccctgtctctacaaaaacaattttttttaaattagccagggtccaggtgcagtggcttacgcctgtaatcccagcaatttgggaggctgaggtgggcggatcacttgaggtcaggggttcgagaccagcctggccaacatggtgaaacccatctctactaaaaatacaaaaattagtcgggggtagtgatgcacgtctgtaatccctactacttgggaggctaaggcacaagaatcacttgaacctaggaggtggaggttgcagtgagccgagatcgggccactgcacttcagcctgggtgacagagtgaaactctgtctcaaacaaacaaacaaacaaacaaaaaacaagttaaaaaattagccagacatggtggagatttcagtgagccatgatcacaccgttgcacttcagcctgggcgacagagcaagaccctgtctcaaaaaaaaaaaaaaaaaaaaaaaggtgaaccagatgtggctcatggtgaagacttgactttacctggagtgaggtgcaaccaggccagggctctgagccaggagggcgctgacctgactcaggtggtcccaggctccttctggctccctctgttctggtgggaacagactgcaaagacaggtacaggagcagggaggccagggaggaggctgctgggacatccaggctggaggggacggaggctgaatcagggtgaggaaatggagggggaagagtttagattctggagagattttgcaggtttagctgacaggatttgctgagagattggatgtggcggtgagggaaagagagctcaaggaatatcccgaggcatttggcccaaatcactacaacttcggagctgcccttgacccagatgggggcggcagggaggaatgggtttggggaaagaccaggaggtcagtttgggactcagctgtctatgttgagctgagcccatgtggagctggggtgcagcagccgaatggaagaggttcaggggcatggtctggttaagacgtcagtctgtgagtagacagggctcaggccgccgggagcgttgcccaggtagtgggcatgggtggagaaggaccgagggctgagttggctggcatttgggctgggcgggtggtgtatggggtatccagggaagccatggggggtagggaacccatctgttttgtctgtgagtgacaaggggccctctctgaattaggggaaggaaaaaactcagcttgtgggacggggcagccagggctggagtcagacccttacctccttcccctgatctcccaaccccagagtgtcttctgagatccgctaccgaaagcagccgtggagcctggtgaagtcgctcattgagaagaactcgtggagcggcattgaagactatttccaccatctgggtagggacagaaggccggctggggcgtgggttgggggatggcctggccaggtatggacatccagagccccctctcttttacgcagagcgagagctcgccaaggctgagaagctgtctctggaggaaggcgggaaggatgcccggggcttgctatccggcctgcggcggcggaagcggcccctgagctggcgggctcacggggacgggccccagcacccagatcctgacccctgtgcccgggccggcattcacacctcgggtacgttccgttggggccgggttggggtaggcggaggatcgggggtcctggactgggccatctgactccaagctgctctcctgcaggctccctcagctcccgcttctccgaaccatctgtggaccagggccccggggcaggcatccccagtgccctggttctcatcagcattgtgtgagtaagagacaggagcagtggccacacaggcctgaacctgcctcctggctgtgtgaccttgggcaagtgtgtggcctctttgagctctctgcttaagtgggagcgtgggtttgctcacagcaaggattagacaaggcaatgtttgggatgtgccggtttgtcatggagaagccttccctgctagaacagcagagccggggggggctatgggagatcagaggggcctgacctcacccaaggatcaaggggggctttctggaggagcaggcacacaaagattctggaattaggtgcacagggagaggtgtgcctaacaagtgaggtcatttatggacattatgttctctgtgcccactcctaagctgggcgatgctgaggacaccgcagtgaccttgaggaaaagatagacctcacaccagaccagagtgatccgggctgggatgggggaggtatgggcagaggggttggggctgggagtggggaagccctgggaggccagcggcggcttcctcccaggccagagggggcagtcaggatgggcgtcctgagagagtggagaccgcgtaggctaagggcttgggcagggagaacccacactcctgcccagaagcctgcaggagttggcgggcaggacgctgggaggaaacagaagcaggatcccggggttgagcagaccctgcgaggtgagggtcaggccagctacatgctcagcctctgagcctcagctctcagctctcatccagtgagggggcgtggtgctctcagccaagagctgccccgggtgaggagggctgggggtgtcgggggcaggccaggcggcgctcatctctctgtctcccctcactgctgctgctgcaggatctgtgtgaggtagggtcccgagtcctccccctgccctcccctccctgcaccccacccctgctgcagcctcttctccccaccccatgccccccagctcccccagggaggtggcctggcatggcagtcaagggtatgggcatcagacagacctgggtttgaacactgacttccctgctatggactgtgcaaccctaggcatgtctctcatcctctctgagcctaattctcctcctctgcaatgggggatagaggtgtccctacaagatgtagttgtttgggggtgttcagagcatctagaccccaggaatcctgacctctgacccctgtccccagccttatcatcctcatcgccctcaacgtcctgctcttctaccgcctctggtccctggaaaggacagcccacacctttgagtcctggcacagcctggccctggccaaggggtgagtgggtagcctggggaaatgggggggcttgggcacatcgggggaggccaaggccctgctcaggcctggcatccccacagcaagttcccccagacggccacagagtgggccgagatcctggcgctgcagaagcaattccacagcgtggaggtgcacaagtggaggcagatcctgcgggcctccgtggagctcctggatgaggtaggaggcgccgctcgggcagggctcggggctgcggggctgcagggtcctgtgttgaaaccccaccgtgcggcaggcacttcccctctccggatctcagtgtcctcctctgtaaaatgaggaagccgctcagagtccccaccccacagcattgcaggggaaagcatggaagcatggatggaagacagaactgattggctcacgtcctggagaaaagtccagaggcgtctcacattaggcacggccgggtttggtcactcaatggcagtaagagtcagtctctcgtgcccactctgccctgtgcccatctccagggttggcttcattggaggccacccttttccccccacaggggaccacggagcttactctcattggctgctggggtcccaggcctacccctgacacatcacaacagccagggcaggccacgtgtggtccctctacccgctaccccactctggggtaactaaggggtcacatggtctgaaggggagagactctccaaaggacctgaggtctcatctccaaaacggagtggacccagacacccagtgtagttcagggacaatgtctactcagacaaccaggttccaattccggtgtgtgacctcgtgcaagtgattttgccatggtggccgtggactcctctgtgcacaggataatgactgatgctacctcaaagactgttgtgaggatgagacaagttgacattgggagtggtgccaggcctgcaggaaacactggatgtgggctggctgtcctgagtttgagcctagtgccagggacaaagcagatgcccaataaatgtgatgtcatcacacgacaattccctcaggccccagtagactcaggccagcagttgcggtgggtcagagcaagtgtcaggccagcagttgcggtgggtcagagcaagtgtcaggccagcagttgtggtgggtcagagcaagtgttaggcactcggggaaggtgtcgagggggaaagcggatgggaaacagagtctggcattgcctgcatttccaaggccatcagagctgaagttgtgggtgacggtgaaaatcttgtctcattggacccttccatatcagaaggctcatctttaggggtctcattgccccccgaaatcaagcttgggagaggctcacactggaaagggcggggcaggatggggtggggaggagatgaaggctgaggccccatcactcatagagagggtaggcagggccccccatcctgcgttattttattttattcttttgagacaggatctcattctgttgcccaggctggagtgcagtggcacgatcatggctcatcgctgcctcgaactcctgactcaagtgatcctcctgcctcagcatcctgagtagctgggactataggcaggcaccaccacacctggccaattttaaaattttttgtagagaccagagtctcaccatgttgcccaggctggtctcaaactcctggcctcaggcaatcctcccgcctcggcctcccaaagtcctgggattgcaggtgtgatccaccacgcctggccctgagttaaatttttatcattttcctctctgtcaaactgctaagggtgcagagttgacgtcacagattggtgctcacagtagatgtagactgagcacttacctgcagctgggctgttctaggttttaagcatgactgctttatccccacagccagcctttgagaagatgctcttgttatcccagtttttttgagacagtctcgatctgtcacccaggctggcgtgcagtggtgcgacctctgccttccaggttaaagcgattctcgtgcctcagcttcccaggtagctgggattacaggcacccgccaccacgcctggctaatttttgtatttttagtagagacgggctttcaccatgttggccaggctggtcttgaactcctgaccttaagtgatccaccggtctcagcctcccaaagtgctgagattacacgcatgaggcactgtgcccggccgttatcccggttttatacataggtaggcgatatgaggcatccagaggttcgaggagctcaggagcttgcccgaggtcacagagtgggtaatggtgacagctaacatgtgctgagcacttagtgtacaccaggttctcagtgctcttcagaaccctgaaataatcctgtggagcagatgtgttatagacccgtatttcaaatgaggggattttggctcagggtggttacgggacttgcctgaggttaactgaggtaacaagcagcagagccaggatttgaacctaggccatcggggtcacaggcacacactaagccccttcctctgctgcctctgagaagttaaactgggtgcagcatggctgtgctcttttcaccaagggaccctggggtggggcagtatggcctctagaccgtcctcagtttctcaatggcaaggtgggggtgggcgacatcaccccccagcctccagcgttcacccccgaccctgctcacctcctccccgcagatgaagttctcgctggagaagctgcaccaaggcatcacagtctcagaccctccctttgacacccagccccggcccgatgacagcttttcctgaggaccccggccacgcagctgttcccccacatggacagatggacacacagagcctcggcggccactgctggcacggtgtgagcgccaggcatctcccacccgcccctcccgacggcccaaccaggggctgtgcagacgtggggaccacggaaccgagatgcactttagaccagggagctggcccggcctctggcaggccccccactaacttattttgcccggctgaggttgtggggggcgcctcctggggtgcacgattccctcagctctgggtttaatgtattatatttatttggggccgacagtgccccaataaagggtcagaagtggctgtggctgtgcctgtggggccctgggagtgggtgggagcctcctgttgcactcagatcctgccatggtggggaggggacctctgtctgtgttctggggccatagtcactgaaacgatctggaattcccgcagcatcttacacaagctttacatcatctgaggtcaacgcaggaactccggggacagaccgtggtagctggagttcaaatcctgcttcctagcagtggtgtaaatgcagcaggtcagccccctggagctccagtgagctttcctgtgcaatgggtagaatggcagtagctgtctctcagggttgttagaaggcagtggttctcaaacttgagctgcattcgaatctcctggagagcttgatgaaaaacagactgtgggcccctccctccaaatttctggttcagtaggtctggggcagggctgggattctgcctttataacgagttcccaggagttgctcatggtgccatcccagacgacactttggttttttgtttgtttgttttaagttagggtctctgtcgcccaggctggagtgcagtggcacaaacatggctcacagcagcttcgacctcctgtgctcaagccatcctcccacctcagccttctgagtagcttggactacaggtgtaagccaccacgcccggctaattttttatttctttttggagatgggatctcactgtgttgcccaggccagtcttgaactcctggcctcaagcgatcctcccgcctcagcttcccaaagtgttgagatttcaggcgtgagccaccacgcccagccccagaccacactttgagaaccactattataggttcaaggagttcataaatgtggctacttataacagggcccggcacagatggaatggagtaagtattcaataaatgttacacttattgcataaaaatagagggaaaaaagtaactcgcgtagtgagtaccaagtacgtacgtacccagctctgtgccaagatctgatgttcattttattctcacagtgattccatgaggtggagacaaagatgtacacgcccgaggctacccagcagggaggcagactccaggcctgacccctggggtctccacatttacatgcaaggtcctaaccccctcaggaccccaccacagcccattcaggctgacgttggttggattcctgttttacagatgaggaaatgagcttggaggcaaagtccctggtccagaaagaacccaggtccacctcacgcaaaccttgtcctggttccagagggagtatgtggggtagagacacctttggcatgtcacacccccggctataagaatcatcctaactgatggcttggagcaggggactggaggagggtttggagagtggatcaggagtggcataggaggcagagccagcctctcctatcctctagttgtgtgatcatggcaaggtacccatgctgagcctcagtcttctatatctgtaatatgggtgtaataataataccacctataggaaaaattaaatgagctaatgttagtaaagtgcttagaatgcttagaacagcaccaagcccatacatagtaggtgctcactgaacatagcttatagggccgtgaggtgcctcctgtccagtgctgaggcctgtcctcactgtgccttcacctaccatcccccaccagtggaagggcccggaacagcaagagggttattctctgcaggggaatttcacagctcagaaggtgctggcgtaaaagtctagaccacagaggtgtcggatgtccctggctccctgcccctctgccatggtcctgccccacaccctggctcctcttgcctggcagggctgggccagggggattctgagaccttaccccacccggaattggaggctaggatctgggtagtgacccttcagccgagagtctcactcccaccctggtcctgacagcccagaactcccatctccattctctcaatttggcagaacctactggtaggacaggccactcaccactgctggggcaggattccacatccatcctaggccagctacatgactctgggcaggggcacggccctctcccagcctcagtttcttcatctgtaaaatggggataatagaacttgctgaaggtttggggcagtagaagtgggttctgcaaatcccaaggacttagtgaacattggcattcatttatttgtttgacaaatattgattgagtacctacaatgtgccaggaacagttcaaggtgcaagagacacaagacaatatcctcacctgggagattttttttttttttttttttttttttttttacatggagtctcactctgtcaccaggctggagtgcagtggtgtgatctcggctcattgccacctctgcctcccgggttcaagcgattctcctgcctcagcctcctgagtagctgggactacaggcatgtgcccccacgcccagctaatttttgtatttttagtagagatggggtttcaccatgttggccaggatggtctcgatctcttgacctcgtgatccgcccacctcggcctcccagaatgctggaattacaagcgtgagccactgcgcccggcctttttttttgagacggagtttcgctcttgttgcccaggctggagtgcagtgatgcgatcttggctcactgcaacctctgcctcccgggttcaagcgattcttcctcagcctcccaagtaactgggattacaggtgcccaccaccactcccagctaattttttttgtattgttagtagagacggggtttcaccatgctcgtcaggctggtctcgaactcctgtcctcaggtgatctgccccccttggcctcccaaagtgctgggatagcggggggcggctcacatctgtaatcccagcatggtcaacatggtgaaaccctgtctctactaaaaaataaaaaaattagccaggcatgatggtgcacacctgtactcccagctacttgggaggttgcggcaggataatcgcttgaacccgggaggcggaggttgcagtgagacgagatcagccactgcactccagcctgggcaacagagccagaccctatctcaaaaaaaaaaaaaaaaaaaaaaaaaaaaaaagaacataatgtcaggtagtgaggctgctgtggaaaacactcaacaagaggtaaagagtaaaggaggtcaggttaggagcggggaaggcagtttaccctgaagggacacagaagacctgacgaaggtgacattggagccatggaggcccacggagaggggcggggcagggggggagagccggggcagaggggagagctggggccaaggccctgaggcaggaacgggttccctgtgttgggaacagcaggagggcctgaacagccagagtggagtgggaggaaagaggggtagaaggtgacatcagggacataaatgggtgcaggggatcacgaaggggtcctcctcctgaaacagcacctccagattcccggggctgcttctctccagggtgccccgcctgcttgggtgaggtccggattgtagctgtagtcctagcctgacggccccccaccctcctctaatgcctacttggggtccctgcacattgacccccaggcctggatatcagggctcaggggagataacttggaggttcgccctctggaactcctgaggatgacctccatcatttgaagtcggaaacccggcccccaaactgcgctctaagtcctcctgtgactctgggggtgacctttccagactccctgggaaggtgggggggggggggtggtcctcagagccccagcggggtcggagacacacagaccaccctccccgttcccagaagtcgcggtccctgcgccacccggagaggccggtgcagcgggcgcctcccgggccgctgcggcaaaggctgggcggccgcgccttccccccgcggtgattcatcccgccccctccctctcctccctcgtccctccctaggccgccgccgccgccgccgccgccgccgctgcagtgcgcaggagaccgcggtccgcgcccgagcgcgcccgagccggagcgggaccggggtcggtgcacctagcggatgtgcccggctgcgcgcgccagcgcagcagcccgagcagcggccgccgcccgcgcggcggggatgcccggacgccgggccccggggctgggcccccggcggtaaccggagcgggggggccgcgccccccctcctcccccctcgccggtcccagagccgcagctgctgcgcccgcgcgctcccggggacattctaaccgccgccaggtcccgccgcctctcgccccgctattaataccggcggcccgggaggggggcgcagcacgcgccgcgcagccatggggaggctgctggccttagtggtcggcgcggcactgggtgagtgcgcggggggcgcgcgcggccggggggcaccgcgggggcactggcggggcggcgggagtggcgctcgggacacggggcagccgcgcgagggccacccccggcccatccccgggccccgccaagtcagcttcagaagttgtgcgcgcgggagccgggcttggggagggcagtggaggtgagggtgggctccagcgggtgggggccgggctggcacagcctggcggctgcaggcgcccagccgggggcgaggaaacgcggagtcagctgctcccggagccccgcaggctgcaatgtgacacccacagccgcgggaggggggtggggggaaggcggcgcccggagactgggacgggaaagacggagggacagggagagatgaagacgggaggaagggggcgagagacagagaaggactcggagcgcaccggagtggtccgctgggatgctggggacatgggggtcaagggggagacggagacagagagaggggtattggagagagagagagagagagagagttaagagactgagcgcgatggagaaagggaaacttgagaaaggcagaaggagatggagagaagagagagggagatgcgggtgcccgtgaacaccgggagagaatcttgcatggagtttgaaaagggatagacgtagaaaggtggaaagagattaggagaggtctccttctgagcccagagagtggacaaaaagtggagggaccttcagagagacccctgagagggacaaagataggagggactgagacagaggccctcagggagtctgaaagggaccgcaggggaggcggatggatgagaagtcctgaggatcaggaaacaaggacagcacagggctgcagcagaagagacacagcgttagctacagagtgctgggaggcagaaaggaggtgccaggtaagagtgtgaaggaattctaagactggaattcagtgggctgcaaaagccctggggcaggagagagctcaggaaagctttgagtagtggatggggttggggtgggaagagctctagaggcgaggagcctggggaagaggggatgatggaggcaggagaggccggggaggggatggctcacacaggggcttgtgggctgtggagaggggctgagtgtgggtcagccccggtttcagtgcccacctccccacaatcccccacccccagaccttttctcccaacccatttctcctggagctagctggttttacaatttaatggtgaaaatgactgccaccttaaacttctaacttagctggaattctcattctaccacctagatgcttgggttcctccagcaagggactttctgaggaaggggcactcgggtagcataaagtctgagttaccggcaacgttgacagtcccacttatggggcctcccatgtacaaggccctacctaatgtatgaaaatgggcccagccattgctggaagcaaaggaccatttctttcaacaagagagagggaaactgagactcagggatgaatgacttgctgaggtcacgcagtgagtgacagggctcagcctagcatccagtcctgtctgctggtaatcattgaggggggaacagatggtttgtgaggggtctggcattgcttagggcaatgggtgcctctgcctgacctgagcctgctgtccccacagtgtcctcagcctgcgggggctgcgtggaggtggactcggagaccgaggccgtgtatgggatgaccttcaaaattctttgcatctcctgcaagcgccgcagcgagaccaacgctgagaccttcaccgagtggaccttccgccagaagggcactgaggagtttgtcaaggtgtgcgggtgccgggaacgggcatgggagggcaggggtccacgagtgggaggcggtggggctggatctcagggagggggcttatttgtttaataatatgctgtgattgctgacctggattcagattctggctccaccagtggccagctggtgaccttggccaagtcagtgagcctctctgaaagtcagtttcctcctcggtaaagacggggtggcggtggtctctagcccataggtttgtgtgaggactgaatgcattgacgcacctggcacacggttggcatgaaataaatgtcagtggacttatttggcaccagcaaacaatgtctctgatagtcattacggagggaagacagaactgttttttttaacctcctttaaactatgtgtgtattttgcattatatatcggtgagggaaccataaaattctgtgacgtgctggagagttggggtctccagctgctggaatcaggctgccctgtctctgctggaggagtgtgtctggtggctgggaaagaacggcagagaatgatagcctagaggccagatggggcttgggaggatgactgaggaacgtgtgtgtgctcgtgtgcatcttggctagaggcaaaagcggggtctggttgactccaggcgtgatcctagccccccacccctgtgccctccctgcctgaggtcaaggtgtctgagcccatctgtgtgccatctgtgtttgtgggtgtcagggcaggggacagaatcagggtcaggtaagggaagagaggcccaggcagtgacaccttcccctccctggctacccctagatcctgcgctatgagaatgaggtgttgcagctggaggaggatgagcgcttcgagggccgcgtggtgtggaatggcagccggggcaccaaagacctgcaggatctgtctatcttcatcaccaatgtcacctacaaccactcgggcgactacgagtgccacgtctaccgcctgctcttcttcgaaaactacgagcacaacaccagcgtcgtcaagaagatccacattgaggtagtggacaaaggtgagtcgggtgctgcctgcccctttaccgtcacccaccggagagccagatggagggacagatggcaggcagtggacaggacaggctggctctgtgcctggccagccaaccgcccacagcagcgggctgagggggaggggagcagcccctcctgcccactccagctctggcctctgtttctctccagcccacggagaggtcaaagcatgcctgtcccccacagacgctccgggtacagaacccagctctgtcacctgtgctgtatgacctctggcaggtgccttctgtctctgagccaaagggttgtcctgggcttgcccgggataataatccgatgtgtttctcggggtgtggtttgagccattcttccatcatggggttcatgaggattgagcagctgcaggcacacgcctggcttccagcagagccttgcaggtggtggcgagggtggcggttcttactgttcgagtagctcagccctgctgccctctgtggtgatgaggcaagagagcgtgccacctagagcagagttccgcacacccctctgcactcctgccccgggggagccgcgctggcctgcagtctcactcaacacctctggggcgggcctaggggtcctttctaaagctctcaggtgaggcagtgaagggccacaggtgcggggcccaccctctgagcagcaagggcctacagcgcttttgaacgtctcatcattttgcctcagccaccctggaccccttttctgagggaggtccgccccttctctgatccatcttctgctcagcatcaattgcaattgtccagcgccctgtggccactggcttagagttggggaaacagcccaggccttgaagcagctacaagccgtggcagaaaggtctctcagggccacggcacacacatcctcatgggcaacacgcactgcccatcttttctgtgagatgggtgccggcctcagtgccttacacggagtcccttagtgaatcctctccccaccctctggggtaggggctcttcctatccccattttacggatgagaaaaccaaggctcagggagggaaggttatgtggccaaggtcatgtgattgggagctggacttgaatccagaggagcttgggtgactgtgtttctgttcttggcatgattcactgtactctgtgatcagccagagcctgtgggtttctttttataattagcatttttacgtttattgtcaaattggtgtagcagaatgcaattcagcaggcatgtctgagccactctggtgtttgtcacgatgctggggggtgggggtcacccgcagacatggatgatggagccccgcctgcggagttgctgtgacaaagatgcctgcggtactgggactttacaaaacctgtgttattgctcttgcaaatctgcagaggtgagatggggagagggtgggaggctccagggcactgttcagccacccaggttctttccatcttgttgtttggcagttggccagggtgttgtgtcctctgtacgccgtgacccaatagagcctctttttttttttttttaaatttagatttttattttttgagacggagttttgctattattgcccaggctggagtgcaatggcgtgatctcggcccactgcaacctctgcctcccaggttcaagtgattctcctgcttcagcctcccgagtagctgggattacaggcatgtgccaccaagcccagctaatttttgtatttttagtagatatggagtttccccacattggccaggctggtctcgaactcctgaccttaggtaatgatccacctgccttggcctcccaaggtgctgggattacaggtgtgagccactgcgcctggcctgagcctctcttttttaggattgcccactgtatgacactacatcccacagcctgtgctattaccagcatttaccatcatatgcagttccttatgttggccctgcagagtttgtgttttctgcactatccacccagttctagtgttttttacccaccatatgtagtattgccttttaaacattacccactatattatagtattttatattacccactataggatattttatattacacaatatattttactatcataatattgccaaacacaacagttttttgttttttgttaaagagaccaagtcttgctctgttgcccaggctgggatactgtggcgtgatcatagcccactgcagcctcgaactcccgaaatccagcgatccttctgcttgagcctcccacgtagctgggactacaggtgtgagccactacgcccggcaattttttttttttttgtagagactggatcttgctatgttgcccaggatggtcttgaactcctggcctcaaataatcttccctccttagccgccgtaagtgccgagattacaggagagagcctccgcgcctggcctacagtatttttattataatccatcatactagcgtatttttaacgttccccaccatggcgggtatttttattacccaccatgctatgctatagtatttcaaaaattaatcctattgtagcatgtaaaaatattccattctataccatactatattcatcattacctctgatactacagtatttttaacatgactcattgtgctattgtattttttcattacccacaataccacaatattactgtatttgttagcactgcctgccattccttattattattatttttgcaatggagtctcgctctgtcacccaggcaggctggagtgcagcagtacaatgtcggctcactgcacctcccgggctcaagcgattcttctgcctcagcctcccaagtaggtgggattacaggtgcacgccaccatgcccaactaatttttgtacttgtagtacagacggggttttaccatgttggccaggctggtctcgaactcctgacctcaggtgatccacccacctcagcctcccaaagtgctgtgattacaggcgtaagttaccatgcccagcctattattattattattattattattattattatttcaagttagagtctcactctgtcacccaggctggagtgcagtggcacgatcttggctcactgcagcctccatccacctcccgggttcaagcgattctcctgcctcagcctccgaagtagctgggattacaggcacgcgccaccacgcccggctaattcttttgtatttttagtagagacagggtttcgctatgtagaccaggctggtctcgcactcctggcctccagtgattcacccaccttggcctcccagagtgctggaatgacacgtatgagccaccacactgacctttttattatttttatccaccatctcgctgcaatttcagtattgcccatcgacctatattgcctcctggtaatgacccctgaggaatgagccatgccatttccataggtggaggcgacgggtcatggtggtgagaacttcactgacctggaagaggtggagaagatgctgggaagctgctgagggctgcccacctgtgttaggagaaggcagatggggacccatggggacagtaatactattttggatccacacaacgggagtggaaaatgccttgaggcacagcagcgtctgaggcgggtgagaaatccggcctgcagagtcgcggctggccttcagatctgcgggctgcctgtgagatgccgtgttacctaaatccatttgggcactgagttccaggagtgggggcaagaattccgatgacggggctttatccggtgcgcatccagctcagagtggttcctgagaccagccaccatgggcagccaggatgtgctcatccttgaggctttccgaggcatcaaggagatggttggataaagaatttagcacagagcttgactgatggcaggcgcccacaacatgagacacattaataatgtgtgtggaggccaggtgtagtggttcatgcctgtcaccccagcactttgggaggcagaggtgggaagatttcttgaggccaggaattcaagaccagcctgggcaacacagcgagacctcatctctaccaaaaaaaaaaaaaaaaaaggaaaaaattcacctggcctagtggtgcacacttgtagtctccgctactcaggaggctgaggcaggaggattgcttgagctcaggagttccaggctgcagtgggctatgattgcatcactgcactccagtctgggcaatagagcaagaccctgtctcttaaaaaaataaagtctgttgaaaagaatgaatgaaggaaggaaggaatgagagggaaaccctgtctcagctcctcccgcagggaagctggggcagggcaggcagggggggcatccggccccgctccctcccttactctggcccagaaagcactggtgccatctgcacagggtggagccaaagaaagtgccccactcacagcagagggaggccatttgaggacagcagggaaaatgggatctcagccatctaggagggggccagagatgtgggatggacacctaggaaatccagccgaggacaccagagtggcttttgactctggtcccctggctgaacgcgttccctttacagtttaaatttaggctcaaggagaagaagctggcaatcggcagggccagtgctgtagagaggatgtagggtttccggaaaatagccaacacttcagcagtgctggctgcgagctcatccaagcatgttacgggtgttaactcatttcctctccagcaaccctgtgagagggtctgagtgttcccatctccattttacagaggctcagagaggtgcagtcctttgcctgaggtcacacagctagtaagaggcagagccgggatttgaaccctggcagtctggccctagagccccagctgttaaccattaggctttatagccccagttataacaacaataataatactaatacaagtgaaccttcactgagtgccatttatagatcaagcactattctaaggattttaaagcatatttaattctcacagcactctgatgaaggaggtattcattttacaattgaagaaacagaggcctagagacattgagtcacttgcgcaaggtcacacagctggccagtggcagagccagcctttgaacctgagccttctggttgcagagctacggcttttaggcaccgtgctgagggcctccagaatgacacagatgtggcctcgagttacacagggaggcaggttgagggtgacccccaccaggcctacccaaggctgggtattaataatcacagtgcatacaccaggcccagggaggttgagccactcatccaagctcacacagcaagctcacagcacactcaggctgtcatgcagcctgggctacccccttaaccctgcctggcccctgcagccaacagagacatggcatccatcgtgtctgagatcatgatgtatgtgctcattgtggtgttgaccatatggctcgtggcagagatgatttactgctacaagaagatcgctgccgccacggagactgctgcacaggagaatgcgtgagtagggtggctgggaggtgggagggcacccagggcaccgtcacacttgccagagaggaactccggagcccgggcagggaggaggcagcggagcggcccagggcgccatctctcagtactacccagaggggagtgctccctgtcagacacaggataggggtcgtcagacccagccccttcctccctccaactcaggagcccaggctcccagccagattcctcaaagaccctgaggagtccacccatagactccttctctctctaactaaggagccctgtgtacctggggtggagaccgctaccttcccccatcccccgggggttgggtcggtctgatgatggggtcactgtatacctggcctttcccccacagctcggaatacctggccatcacctctgaaagcaaagagaactgcacgggcgtccaggtggccgaatagccctggtaaggcggatgggctggcagaggggaaggggattgggaggggccgaagtcccccaggtccctaattccccctctcttgctccccttcaggccctgggccccgcctcaaggaagagccagccgtaatggggactctccaggcaccgcctgcccccagcgtgggggtggccactcctgggccccagaaagcctcagagtcctgccgacggagccactggggtgggagggggcagggggcttggctcgcacccccactttcgcctcctccagctcctgccccgccggccgcgcaccgccatgcatgatgggtaaagcaatactgccgctgcccccaccctgcttctgctgcctgtttggggaggggggcggtgaggtgggggcagcggccccgcacccctcctccttgctgatttgcacacattggccgcttcagacacgcacttctggggccagcccctccccgcctcctccctgcctggcggcaggggtcgcgatgatgggctggagcagtttggggcagggggttctgggacccactccgactccccctccccggcatcatttcccctcccgcttcctccggctggacctggggtcccccctccctgtaatgcactcctgccccggcccaacctcgccctctctcaccagccttgaactgtggccacctagaaaggggcccattcagcctcgtctctttacagaagtagttttgttcatgaaataaagactcttggacttgatgcatagtttcgattgtgagccccgtcaccttccccccattcccgtccccgaatcttcgagcccgctttccagggaccctacctgagggcccacaggtgaagccacttagtgcctgatctgtgtcggggttgggggagccatgggctcaggggtgagggagagtggaacggagccaggaagggagggggtgccgtggagggaagagaatcgaggctgatgctggggtgcaggggtggcatggggtgtgtggtgtgcccagcagtgtgagtctctggagaggtgggcgctggggagaaggagagggaaggagagacgggtatggatggaaaggcagaggaagccaggctaaaccagcgtgtcccaatgaggggccctgggctgagtggaggaaatgggtgcggtggaggtgggtttggctgggcacagcgggcacgtgtgggtaagcgggtggggccggttgtgcgggtggcctatctggggcaagcagccgaggccgactgtgtccggcgtgtggttgagcacgggcaggtgtctggcggtgaccctgcacgtctggtgtttacctggccctgggtctgacgtgggccgcgcctggctgctggcgggacagtgtgttatctgcctgcggacgcttccggccacttggcctgggcctctgcccttagcgctgtgttttcccggccaagccccccatcccccctatctagtgctaggactttctggctccagaggtcaccgcggccgggcggaggctgccaaagcaaaccagccccgtgacttgtaggaagccagcgggggaggggccggggcaggatgagcagggcaggcgggagaggctggggctggggttggggcccaggaattgggcagggaattaggcagaggtgcagcaagtggcgggcacagccaggacctggggctggaggacgcagaaagggcggggggaagggttcgctgggtgagggtggagtgggcttagggcagctggggccctccatctgatctcttctggtcagacccccacccttcagcctgcactttctccctaaacccccagcctccggccaggcctgtccctgttcccacatccccgcagacaggcacacctgggtccccctggaggtccaaggcaagccccgtagctgggcccgcctggtccagcccccacaagcccggccccatcagccaggtggcctccagtgctgccaatcgaatggtccggcccctccccgccccttcacccgcccctcgcccagccccctcctcctcaggtgaggcagcctggcctagcaggccccacgccaccgcctctgcctccaggccgcccgctgctgcggggccaccatgctcctgcccaggcctggagactgacccgaccccggcactacctcgaggctccgcccccacctgctggaccccagggtaaggacaagggcccccagactcacagttccagccctgaggacaggggttccctcatccccccacccagcctaatgcccacctcctaatagaggggttcctggggacctgaagagggggcactatgacgtccccccaagcacctaggtgttctgtcctgctcttccttcagactcagccgttggaccccagtcctttcctccccagacccaggagttccagccctcaggcccctcctccctcatactagggagtcctggcccccaaattcctcctttcccaagacttatgatttcaggtcctcagctgtctcctccctcaaaccgggatcctcagtcccctgctccaccaggctcaggcatgggggtccccatccctgcaaatccaggcgtccccccgctgctggtcagacactgaccccatccttgaacccagcccaatctgcgtccgtgatcacggcgtgctctggccaaggcccagtccctacagcctgcctggatggacgcctgggactgggggcgccaggactgggctgggctgggctcccccaggccctgcctccccgtccatctcctcacaggtcccaccctggcccaggaggtcagccagggaatcattaacaagaggcagtgacatggcgcagaaggagggtgagtccccttccctgagccccagctttggctctgcctggcgccccgccctctgtgctcttttctctaccctctactcttcggagccccctctctctgggcacccctcccagatgcatccccacccctgttagtcctcctccacctgattaactattaaccacattttctgtgcagctgtgccaccaccagcctcccttctaccctatgtgaccttcctggcgtgctgcctcagtttcccctcatcccccagtgatttctcagctaactctggacttgtcctctgctggggctgaggcggggaagctgtagctgtcatggttaaggacacagatttggagtgaaacacacaggcttgcatttgaatttgctcttgccatcttttttgctgtgtgatctggtgcaagtgacattattcttagggctttggtctccctctgggtcaagcatggataccagtcctccctctgtgaggttgctgagtgcatgacacacaccaggcactggtctggggctctgcatataagacgcatgccatcaagcagagctgtcatgacagaggttggcaaactcggagtcccagagacccaggacccccaccgatcccagacattcctccacctcctggctctgtgggcaaaagagcagagggaggactttggactgggcctggatggatggagaggggagagacggcagagaaaccaccataaggatgagagagagagactgcgtcatggagttgctggcccttgggagtctctgggcagcccccagctagcctggcttcctttctacctctcacacatgggacccagctggaggggcgcatggaggggcgtcctgttctttctgccttcccctagctggggctgactccctctcttcttccgcaaccaggatagccgggctcagtcctgggcagtagcactttctagctgtgtggccctgggcagacggcgtgttctccctgggcctccattctctcatctgtgaaatggagagggtgacagtgcatgtccaacagcgtggggcgaggcctgaaatgccaggatgggcaggaagcactgagcgtgttggctgaaatgattagttcagatctctggcctcctcgggtctcggcacagctggcaattcagaccccaaaccaatcagctgcagtccagagggaacccaggctcccagttactcaggagaaggcattgcaccctagccgagcaggtggatgacagaatccagctccttggggacaatctctttcctggagctgccggaaggacagccccagggcttgggcccatgggtgaatgagccagggaagaaaagcagaaaatgcccgaatggacagagatggcctgggtacaaagagaaacagacacaaagtgggctctggtgcctccctggcagctccgggctggtcttggaggggagtcctgctgtcagggctaggggtgtggaggtcgaacctggacacagatgctgaagggttccgattctgcacttacttgccgggtgacccgggtttggtggctgccggactttgggcctccttttctcatctgtaaactgggggtgatggcaatggcgccttcctcgtgaacagctgcaaggatttaagtaaggatgctgtgcaggactggacggggttagggtagggcggtgcgtccgtgtgtgattcagagagccgttgtggctgcagcggctgctgttgttggtgtcactgttattgctgctggcttcttggtgctgcctggaaacttggaattggaggaggtgatactggagttgcaattccaaggatgccaggcagagggaagagcaaggctcttgctcttctctgggaagctgggaggtgacacagcactggtgtgcacgtagccaattgtggtatttctggaggtgaagctggaagttgagctgggtgggagaagaggtgtgcaagctggaccaggcaggggtgggactgttttggggaagagctggccaattccttgcagtaccaggtctctccacaaggtggcgccagtggttagtccctgcttctcttgtctaacttgtattttacaagttctactgtttgggttgctttttggaagctctctctggtacctgatagtgacccacatggttgtctgagaattgggggaaacatactcccaaatctctgaaagccatgcttataccctagtggggctggaaatgccaggctgagggacttaagctgtctggggggtactagggagtcacagagggttctataggtaaagaggggacaggttggatttggtgtctcagtaggttccccaagcctccgtgtggagggtgcgctagaagggagactgagcccagcggttggatggggccggagcaaggtgcagatggagagaaagaaggaaacgggggaaggagagtcactcaggaggattggcaggctgtcgggggaggggaatgttatgcagatggggatggtcctaggagtgagggcctctgagacaggaccgggaggaagaatatacttggggagacattggggagacattctgggacctggtaggggcaaagggactaggaggtcccagggaaaggtatttaaaaggtatttaaaggactgcaggagccctgacctgggacctggaagagggtctagggctggggacagaggggaaactgagtccacagaggtgggtgagacagacttaggggcaaggaggagcagggggaggctgcggccagccctacaaactctggattttacggagtaggtagagggtgggtgaagacagcagcctcagaggcgggaaggaaaatcaggtgcgcctggtgtcccagaagtccaaagaggagagcatttatacaggaagctgcagtcatgtaagatgaggcccgagacacggagccaccagttgagtggattttcagagccagagagccaaaggtgttacgcgtgggggtctttgcagccaaatggtggaggcggaagaactgacctatgagaagacccaaggcatccagaggggcctggagaagcaggggcagagagtctcagggagatgtaggggtgggggaggtctggcttaccaagggaaatagccctgctgctgggatcaaagaattgatgttgacgtgccgcctgtcccagtagagacacgcagggaggatgaggatgcgtcccacaccctgggccagatgaggatgctgcctgtcccagtagagacacgcagggaggatgaggatgcgtcccacaccgtgggccagatgaggatgctgcctgtcccagtagagacatgcagggaggatgcctctcatactgggggaaccccaggatgcagatgcttcctgtcccactggaggcgctgaagtcctctgaaccacacagcatggaaggaggttcttcctctcaccctaggagacacatacatagtggcattgcttcctgtcccaccagatgtgccaaggcctctaggctgcattctgcatggcctagagccctggcaggcacagctgaaaacaaagcaagcaagaccagcccagtggctgtcgggagccaagacctcctgctggaacctggagagtggtcctgggcagagttggggggcaggcctgagaacccctcgcaggacaggcaggggtcagccggcagtagttgggctggtctggcccactggggcctcttttggggaagagagtgtttcctcatgccttgatgggagccactgagctttcaatttttttttttttttaatacagagtctcgctctgttgcccaggctagagtacagtggcgcaatcttgattcactgcaacctccacctcccgggttcaagcgattctcctgcctcagcttcccgagtagctgggactataggcgcccgccaccacacccagctaatttttgtatttttagtagaggcggggtttcaccatgttggccaggctggtcttgagctcctgacctcaagtgatccacctgcctcagcctcccaaaggaccgggattacaggcatgagccaccatgcccagcctgagctctcaaattcttaagacacccagataatggccacaccaggaaggtcctagaccactccctgctctgttccaggtgctggcctggtgccgggttcaccagccacatcaccatgggtgcagatgggcgagctgggagctcctgccaccttggggtgctttgcggctgccaagggcagttgaacccaagccaggcccagctgaaggctttcagcagcctttactctttggccttcttataatccctagtgaaggggttggcttttatttatttatgtatttatttatttatttattttttgagacagagtctcgctctgtcgcccaagctgaagtgcagtggcgcgatctcggctcactgcaagctctgcctcccgggttcaagccattctcctgcctcagcctcccgagtagctgggattacaggtgcctgccactgcgcccggctaattttttgtattcttagtagagacggggtttcaccg[138 bp omitted]ataaaatcccttttcctgtgccaccaggcctccccagctggccccagccttggttcccactaccttccccaagctctggccatctggccatctcgatggcctctccagcctctgacataagagagcctgcttattcttgcctcaaggcctttgcctgtgctgttccctctgcccacagtgcccttccttgtggtctgtgtgtggctggcacctcacctttcagagcttagctcagaagtctcctctaggggaggccctgtgatccctgatcccctgcagaagcccacctgctgccccagcctgcacggttttcttcacagcctctgccacaatctggaaattattgggttcatttacttgtttccttgttaatgtctcccactccccacctacacgcatgagaacgtgaacccctgagagtcgtaaccttatctgtcttctttgggttatgttcccggaacctagaaaggtgccaggcacacagcggatgttcagtaggatggtaaacaaataaagcttctttaggctgatgaaaaaactgagggtcaggcgcggtggctcacgcctgcaattccaacactttgtttgggaggctgagacaagcagataacttgagtctgggagttcacgaccagcctggtcaacatggcaaaccccgtcaatacaaaaaatacaaaaattagccatgtgtggtggtgtgcgcctataatcccagctactcgggaggctcagaattacctgagcctgagcgcttgagactgcagtgtgccatgatcgcgccgctgcactccagcctgggcagcacagtgaaaccctgtctcaaaaaaaaaaaaaagaaaaagaaagagagagagagagaaaaagaaagaaagaaagaaagaaagaaagaaagaaagaaagaaagaaagaaagaaaaggaaggaaggaaggaaaagaaaaaaactgaggctgaggctcagagaggggaggggagttgctcaggcccacacatctctgatgatttataaagcatttatagagaacttgctatgtgccaggcacttccgcacagtgagagccaggatggcttcgtggctgtacacaggggacctggcatcaaacctgcccagggttctggacgctgctctgcctcttccaggctgtcactgtgggcacgtgaccccacttctctgagctatctcaaaaacaggaatcatagttgtgggattgaaataaggactaaatgagctgatgtatttagaacggtgcttagcacctggaggcatcaatacaatttgagctattcttcttcttcttgaaaataactttaaattattatttttagaagtaggtgctcagtggatgcccatttaatagataagaaagttgaggctcaaagatatgatggcacctgccttaggttccagctaggaaggggtagggtcaatatttttaaatgaggctggccagacgcagtggctcactcctgtaatctcagcattttgggaggctgaggaaggaagatcgcttcagcccaggagtttgagaccagcctgggcaacatagcaagaccacgtcgctaaaaaaattaatacataaaataaaatgaggctggcagattttcaagtggaggggcaaatttgatcttgcaactgggtaccatgagagaggtctgatttagggggtatctaggggcaaagcatctagaacagcagaaacgactgaggcagcgaggaaatgccagcggcagggaagagagctaccaagagggcaaaggttgggggtcacagtcccaagaagagatggcccaaagcaaagacagaaatacaaaagcacagtgtcactggggaggagacattccctaagtgccaggaaagtgcagggcggaggtggagaccgtggcaggtggcccggccatgcccccctcccagctggaaccctgggggagctgggcacctggttgttcacacggcaggggaggaacagccctgtcaactgctggccccgggaaactgggcctggggaggacatgcttgggcataataagttagccctgggggcagggcagagctggcctcgggcccagaccctgccgcaatgaggacaggcctggctgtggccccagcatggtgtctgttgcaggtggccggactgtgccatgctgctccagacccaaggtggcagctctcactgcggggaccctgctacttctgacagccatcggggcggcatcctgggccattggtgagagcggttcctgtgcctctgacctcccctggcccctgcagcctccagcctgcctgccctcacccctcccttctctgcagtggctgttctcctcaggagtgaccaggagccgctgtacccaggtgagtggagcaggctgggaccctctgggggagccctggaggacacgtgtatctggcgggagctcaacaagcgtatttgttgaataaatgcacaaatgcatgcagaaatgctaatcataatagtgcatttgtattgagtgcctgctatgtaccaggcactattctaagcaccccacatgtctaacccagactttttcagacaccagtgtattactcatgagtgcctcataaaattaaattagtgagttggaaaaccatgttttttttttaagtatgaaatagattcgattacagactatcacagtacatctctcagtaagtaaaggttatgctaatttttgtttgtttttttttttttttgcatccatatacatgtaatcccactgcatccccacactctgagggtgggactgttattctccctgttttacagatggggaaactgaggctttgagcaatgcagcagtttgccccagactacagagctatgggctacatcaggatgtaaaaatgtgtttcttactgcgtggcatggtgaaaacatgttggggaggcatgatataaattcagtggacccttctaactctcctaggaggtagtttttttgtttgtttgttttaaaaaagaaaaaagtcttgctctgtcacccaggctagagtgcaatggtgcagtctcagctcaccgcaacctctgcctcccaggttcaagcgattctcctgcttcagcctcccaagtacctgggaatacaggcgtgtgccaccatgcccagttaattttttgtatttttagtagagatgagatttcaccatgttggccaggacggtctctatctcctgaccttgtgatccacccgcctcggcctcccaaagtgctgggattacaggcatgagccactgcgcctgtccctggtaattagctccattttacagatgtgcaaaatgaggaccagagaggacatgcagctggggaacgaggggccaggaacagctcttagacttatccactgtaagtgtgtctgcaggcatgtggaatgaatggccacacaaataaatagataaagaaactaactgtgggatgaatgaatgaatcttcccaaatgccaacttcaagctgccattccctgatgcaggacagcaggaaaaaaggggaagttgggtggtgggatgtatttttcatgtctgtgagcctcatctaattccataaaggattcagttcacactaaaatcagaaatgaaaatccagacaagaaaagccaacatcaacattaatcatcattaccagcacttagcatttgtatgcaccagccaaggccttgggaccttatgatatcaactcattaagtcttcccaacaacctgttgtttttcttttcttttttttttctttctttctttctttcttttttttttttttttttttgagatggggtcttgctctgtcgcccaggctggagtgcagtgacacgatcttagctcattgtaacctacatctcctgggctcaagcaatcctcccatctcagccttctgagtagctgggactataggctaatgccaccatgcctacacaaaattattttgtcaataacaaattattgttatttttatctttttgagccagagtctcgctgtgtcgcccaggcaggagtgctgtggcgcgatcttggctcactgcaatctccatctcccaggttcaagtgattctcctgcctcagcctcctgagtagctaggactacaggcacgtgccaccacacccagctaatttttgtatttttagtagaggcggggtttcaccatgttggccaggatggtctcaaactcctgacctcaggtgatccacccgtctcggcctcccaaagtgctgggactacaggcatgagccaccacacccaacctcattttttaaatttttagtagagatgggatcttgctacattgcccagtctgatcttgaactcctgagctcaaagcagtcctctcagatcagcctcccaaagtgcagggattacaggtgtgcaccaccacaacccattttcctatggggatgctgaggcacagaaaggctgagtgacttgccccaggtcatggagctagtcagtgtcagggctgggatttgaacccaggcagcctgcgtagtaactgtatatagtgtctacacttgattgcttgttaaaaaaaaaaaaaaagaacagctgaattcattgccatagtaaagactgacatatgccaggccctggcggcagcctttacccagcaggcctatgaagttagggctgttacatcccaacattttgcatttgggggaaattgagtcccagtgaagcaaactgacttgcccgaggctgaccacacatcagagacagagcgaagggatcacgcccctgtcaaaagcccctccgtgacaacacgtggcattgagataaaatcccaacccatcacaggctccaagcctcctagtgtggaggcccctctccacccccacctcacactggcttctagcaccctcagggcccagtcccttgctcaaatgacctgctcacacagaagtctctactcacccacttctttctagctcacacccagaggcagatttcagttctgcacagttccttctgagctgtggggcctcccaccagtccctactctctccaagactcaatttcctcatctgtgagatgggggtaagaagaatcagtgggaataagaggagataaaaatctgtgtagtacttgggcggggtgcggtggctcacccctgtaatcccagcactttgggaggccgaggcaggcagatcacctgaggtcaggagttcgagaccagcctggccaacgtggtgaaacctcatctgtactaaaaacacaaaaattggccaggcgtggtggcgggcgcctgtaatcccagctactcaggaggctgaggcaggagaactgtttgaacctgggaggcgcgggttgcaggttgcagtgaactgagatcacgccactgcactccagcctgggtgacagagcaagagtctgtctcaaaaaaaaaaaaaaaaaaaaaggctgtgcagtacttgcctcttagccagcacagtggacattggcttttgtatctcactcctgaaattctttcttgaaatttcttgagcaagatcttcctggacttccagactctatggcctctcaccctatggtgtgtccctgccaccccggtaaaaccctcctcactcattgtgaattatttactcctggcgaactccaggaaggcagggaccttttgtggtcagacggtgcctggcacatagtaggttctcaggaaatccttgagttatgagtgcacccaaagccaaaacactgggatgaactagagagtcatgggcctccagctggaaaggagcgaggccaccactcacacccggctctggccagcaccacgccgccaccctgcagaggtatttgggtttttcaacaactcagggaaatgatgaaacaaacaaacaaacaaaaacaaccccaagcttgtatccccacctcgctttttttttcctgggattttcacacttctaaatatatccaacaacttggcaggcacaccaggtgacccagaacatcctttttgtgttgcctgaaatgataggaacaagaataaagaatttaaaagtgagaaacagcagcagagagtgtgactttaaaaatagccagaggggacatttgatgttctctccccactcccatctcccccaacacacatctataaagtgattttcccccctaaaacctcacactttctggaaatcacatttccagagcagttaacagtcattttaaaataagaatccacccctcttcctgccccagctggtgtttcaaactccaagccttggctttcatggggtgatgaggaccccccagctagaggtgccaggcattcc[139 bp omitted]aaaaccccatctctactaaaaatacaaaaattagccgggcgtggtggctggtgcctgtaatcccagctatttgggaggctgaggcatgagaatcgcttgaactcaggaggcagaggttgcagtgagctgagatcgtgccactgcactctagcctgggagacagagcaagactccatctcaaaacaaacttaaaatagaataaaataaaataagaatccgcccccctccccgccccagttggtgtttcaaaccctgagacttggccttggaattcatggggtgatgaggaccccacagccagaggtgccaggcgttccctgccccaaccccagagcaggaggccatcattaaggcaggccagccaggtggcttttcagtgccagccgtagctgaatatattaggcagggagacaggcaagggtttgtatgagacccacagaaggaacagggaatatgctggtctgggttcaagtcccggttttgctggttagccgtgtgcctctgggcaagtttattcctctgaggcttagttttcccatctgtaagatgggcatagaagtggtcactactggctgggcacagtggctcacgcctgtaatcccagcacttggggaggccaaggcaggtggatcacctgaggccagaagtttgagaccagcctggccaacatggtgaaacgctgtttctactaagaacacaaaagttagccaggtgtagtagcatgtgcctgtaatcccagctactcgggaggctgaggcaggaggatcgcttgaacctgggaggcagaggttgcagtgagccgagatcatgccactgcactccagcctgagcaacagagcaagattatgtctcaaaaaaaaaaaaaaaaaccgaagtggtcactatctccgaggatggttgtgggattcagagagccacttggataggatgcatagcatggggccagcccactgacaccccccagtaaacgtagccagtgctattattactgtgctgttgtttaaccctccagaggggaagtctcttgagaggctgtccagggcaatgttaaaagcttggggtttgaagtcactcagacctgatttcgaatcctctctccctgcttctcgtgcatttggtgacgttggggaagccaccccacctctctgagcctcagcttccccgtctggaatttggggatgatcttcgtggctcctggggtgtgcgacgaggccttggttgatggtggggcagaggtagcctagccccaggaacacagtaggtcctcagctggggagagttctacttggaagtcttgcttctccttgtcccaacctgcggggctgtgggaagacccctcagctggtgtgtggcctcaccaggttccttctaagaggatgcaaaagcaagttttcatttgactcggtttcccagaatgtgctctcagagcccaggccaggcaggaggctcttgagaaaaggacaaaaagacatggtggctcacacctgccatcccagcactttgggaggccaaggtgggaggattgcttgaggccaggagtttgagatcagcctggacaatatagcaataccctgtctctacagaaaaaaataaatttaaaaggcgtttttagctcaggctttgctgggttctaacctggctattgtcactcagctttatcctaacataaaaaaataaacaaattagcagggtgtggtggtatgcccctgtggtcctagctacttgggaggttgaggcgggaggatcgtttgagcccaggaggttgaggctgcaatgagctatgatcgtgccactgcactccagcctgggtggtggagcgagaccctgtctcaaaaaagaaaaaaaaaagtggcagggagaaggaaaggaaaggacaaagaggttcacagctgatctctccctgaacctgctccttccgtccccatctctgtcagccccatcttttcaggctcaggccaaacccctcggttaccctcccagttcctccagtcacccatgaatcagatcttgcaggaaaccctgtcagctgcacctacagaacctctccaaaatctgaactcttctccccgtccactgcccccaccctgctccagcccccttcccctcccctctggacatcccagagcctcctccctggcctccctgctcccatccctgccccccaatcatatcccacaaaggggatatgactcactcacttaaccggcaattctggagggtcttaaaacctggctgcctcaagaggctttaaaatgttatcagatgggggccaggtacagtggctcatgctggttccccacttgcagccagagggagctggtgaccacctgagtcaggtcagggccctcccctggctgcacctcacaccaggtgccagcaaagccctgatgttgctctatttctagctcccacctgatctgcccctccctggctcactctgctctggcctcccactgttcctggagcactccccccagtcccccacaccagccttgggatctttgcatctgcaagtccctctgtctccgtgctgatctcacacacctcctgacactttctcacctcctgcaggtctttgttcttgcaccaccttcccagggacgctctccttgcagcgactgaaaagtgcaacctcaccccaccctccatgccggcactcccctccctcggtggcattttatttttctctgtggccccttcctatcttgtgacacataatatatcctacttatttgtccctttcttgatttgtctcacctactgagctttgagttccacaggggtcggggtttttgtctgatttgttcattgcagtggtgatttgttcactgcctaaaatagagcctggcaggtacaaagtgtttggtaaatagaaatcaataccccagggtctgtgacctgacttaggtgttaacaggttcctctgaggtgtgtggggaacagactgaggggtttcaggggacatctgttctcaccacaaattgccccccaaccagccccagacatgaacagtctcccgggagctccctctagccttctcgtatatcccagccctgcctcatgtcacaatttgtaatgatgtgtttggctgggtgacattttatggccatctgtctccctatcccctataatgtggtttgccgaaagcaaagcccaggactgtctcggccatctgtgtctccaggatcacccctcactgggcatggagtatgtgtccagttaacgcttgctgagtgaatgaatgaatactccatcctctgcctggagaattacgcactttagcatatccaaggctctgacaagtcctgcataaaagagcattattgttttctttctttctttccttctttccctcttcttttctttctgactataggatattgattatcaatctggcaatagtcaagattggcagtctggtgtattagtcaaaggttttcagcctacaaaagacaaaaagaaaaaataaactggctaaaaacaaaaggggatatgatttactaactcacttaaccgacagtcacagaggttcttcaaacctggctgtatcaaggggctttaaaatgttatcagatgggggccaggtgcagtagctcacgcctgtcatccagcactttgggaggccaagacaggcagatcacttgaggtcaggagttcgagaccagcctggccaacatggtgaaaccccgtgtctactaaaaatacaaaaaattagccaagtgtggtggcatgtgtctgtagctccagctactcgggaggctgaggcaggacaatggcttgaatccgggaggcggaggttacagtgacccaaggttgcaccagtgcattccagcctgggtgacagagcgagactctgtctcaaaaaaaaaaaaaaagttatcagatgggaaatgaattccgatattaaaaattgatatgtatttatactatattattaaagttatttttcataaaacatagaagggtaagtttaagaaatgagaagtatttataccaaaatgattaaatattatttaatttaaagatataaatgtcttgttggacaaataattcaaaatttccattagacaggaaaaataagttcaagagatatattgaacaacatggtgattatagttaataacaatatattatatacttgaacattgctaaaagatattttaagtgttctcaccacacacaaagggtagtgcatgtgttaattagcttgatttagccgttccacaacgtatacatatttcacatcatcttgtacaccatcaatgtatataattttgtcaattaaaataaatacatattttaaggccgggtgcagtggctcacacctataatcgcagcactttgggaggccgaggcaggcagatcacctgaggtcaggagtttgagactagcctggccaacatggtgaaaccccatctctacttaaaatacaaaaaaattagctgggcatggtggtgcatgtctgtaatcccagccactcgggaggctgaggcagaagaatcgcttgaacccgggaggcagaggttgcagtgagctgagattgcaccactgcacaccagcctggacaacagagtgagactccgtctcaaaaaaataaataaataaaaataaaataaatacatatatatttttgagatggagtctcactctgtcgcccaaactggagtgcagtggcacgatcttggctcactgcaacctctgctgcccaggttcaagcaattctcctgcctcagcctcccgagtagctgggattacaggcacctgccatcatgcctggctaatttttgtagttttcatagagacgaggtttcatcatcttggccaggctggtcttgaactcctgaccttgtgatccacccatctcggcctcccaaataaatacatattttaaaagatagaaatcactctggaaggagagttaatctgtttgatataataataataatatattaatattatattataacaatatattagtattatattctaataatatattaatattatattataataatatattattatattataacaatatattaatattatattataacaatatattaatattatattatgtaataataatactactccatatagctatggaaaagttcatatgaagaaaccaggctatgatctacaaactggcaacaaatttgttcttctattttccatatgctgtctgtgtacgtataaagtgagaggtctttttatatgagttaagggtgtgaccaaagacaaatggaaaaagacaaatgacaaacatactaataaagagcttcggtttctccacaaaaaatacaataataaaataaaatgttatcagaaatctcttgactctcctccacgttagctcactttttccctcaagagggtgaacatgacccttaacagatccagcctcaagtgctggattctcttgggaacttggttaaatggttttttttcttcccgaatgtccaagtcaccttccagacctgcagctcctgagcagccaacttaggacttctaatggagagtgaagttcccctggttcgcggaggggccggccacagcctcaaggctgctgttgattggtccgacctgagtccttgagtctggcagagtgccatggtgctctgtaatcccacctgtaatcccagcattttaggaggcagaggcaggaagattgcttgagcctaggagttcaagaccagcctgggcaacatagcaagacccgtctctacaaaacaaaacaaaacaaaacaaacaaacaaaaaaattagtcaggtgtggtggtgcacgcctgtggtcctagctactcaggaggttgaggtaggaggatttcttgagtctgggaggtcaaggctacagtgagccaagatcacaccactacactccagcctgggcaacagagcgagaccctgtctttaaaaaaaaaaagtccttgagtcatgattccagatgcaatcgcagatgtgggggctgcaaccctccgatgggctggggttcacgtctacaccacatggctggagcacaggccaggaggggctccggctggggaagcatgtggggagcctggctgtgggacccaggcggccccgggccctgtcgccctgcagtgcaggtcagctctgcggacgctcggctcatggtctttgacaagacggaagggacgtggcggctgctgtgctcctcgcgctccaacgccagggtagccggactcagctgcgaggagatgggcttcctcaggtactgggggccctcggaggggtgggagccgggaggggctggggagcaggcctaacccctgccccgcccagggcactgacccactccgagctggacgtgcgaacggcgggcgccaatggcacgtcgggcttcttctgtgtggacgaggggaggctgccccacacccagaggctgctggaggtcatctccgtgtggtgaggagggcagcgggcaggtggggcaacacctcagacccccaaggcactccctctccccgttttccttccacctgtcttaactggtctctatttcctttctttctgtgtctccaatcccatctctcccagtgattgccccagaggccgtttcttggccgccatctgccaaggtgagatcctaaaactcagaaccctctcctttaggcccttggggaggccacgtcccctcaagctccccaggatggggccatgtactttcagaccccctagggcagggccaagcctgggctctggggacctgggctccagtcccctgtcgccgccccctgctgacccttgtcccacagactgtggccgcaggaagctgcccgtggaccgcatcgtgggaggccgggacaccagcttgggccggtggccgtggcaagtcagccttcgctatgatggagcacacctctgtgggggatccctgctctccggggactgggtgctgacagccgcccactgcttcccggagtgagtgccccccaatggcgctgatgatggggaggcagaggagcggagagacagtggggaggagggcggattgtgcccaggcaggtggccaccctccacccctttccctggtaggcggaaccgggtcctgtcccgatggcgagtgtttgccggtgccgtggcccaggcctctccccacggtctgcagctgggggtgcaggctgtggtctaccacgggggctatcttccctttcgggaccccaacagcgaggagaacagcaacgatattgccctggtccacctctccagtcccctgcccctcacaggtaagtctaagggctgagccatggggcttgaggacccgaggccaggaggacagaggaggggaccaggggcacaaggcaatcaacttatggctcaggcatccttggcaataaggggaatgatctcgagggagcacaaagtgggccttaactatcaatgatcagtgcagccaatttggaaaatttgccagcatttccccaagaagtatacataaagttaccattggacccaacacttccactcccaggacaggaggtatatacctaagacaaatggaaactgtgtctgcaccaaaactcgtacatcagtgttcatagcagcattattcataatagcccaaagatggaaacagcccaagactgtttcatcggacaaatgcataaagaaaatgtggtatattgaccgggcgcggtggctcatgcctgtaatcccagcactttgggaggccgaggtgggtggatcacgaggtcaggagtttgaaaccagcctggccaacatggtgaaactccatctctactaaaaatacaaaaattagcctggccaacatggtgaaactccatctctactaaaaatacaaaaattagcctggccaacatggtgaaactccatctctactaaaaatacaaaaattagcctggcgtggtggcacacgcctgtaatcccagctactcgggaggatgaggcaggagaatctcttgaacccgggaggtggagattgcagtgagccgagatcacaccactgcactccagcctggctgacagagcaaggctctgtcatcttgaaaataaataaataaataacaaaaaaaatgtggtatatccacacaacgggagaatattggaccatagaaatgaatgaggtactgattcatgctaccacaaggatgaaacttgagaacagtgctgaatgagacaagccagccgcaaaggccacatactgtaggatgccacttgtatgaaatgtacaaggctgggcacggtggctcacgcctgtaatcctggcactctgggcagctgagatgggaggattgtttgtgctcaggagtttaagaccagcctgggcaacatagcaagaccccatcacttaaaaaaatgagctaggtgtggtgacggatacctgtagttccagttactcaggaggctaaggcaggaggatcacttgagcccaggagtttgaggctgcagtgggctaggattgtgccactgtactccagcctgggtaacagagcaaaaccttgtctgttaaaaaaagaagaaagaaagaaagagaaagaaaagaaaggaaggaaggaagaaaagaagaaaagaaaaggaaagaaagaaaagaaatgtctagaataggcacatcggtagagatagaaagttgattgatggtggcagggtgggaggtggggatgggagattgggaggtgactggtgaaggacacaaggtttcttgtctgggtgatgaaagattctaagtcgatcatgatcatggttgcacttgtctgtgactacacaaaaagccagtgacttgtgcctttaaaaggaattgtctaatatgtgaatagtagttcaatcaagctgttaccaaaaaactaataaaatgaaaagaaaatgtgttaaaaatgaatgaatcagacttagaaagtaagttaggagtcattccctctgcaattccctggagtattcccttggtcttactgagactcacttaggtgccaacatgtccttaacacctctccaacacatacatcttccttttggattaaaagcaggccctgggcttcagatttcagcaggctgcagtgtaataataataataaaaataggctgggcatgtaatcccaggccaaggtgggggtatcgcttgagctcaggagttcaagactcgcctgggcaacatggcaaaaccccatctctacaaacaaaaaaaattagctggctgtggtggtgcgcgcctgtggtcccagctacttgggaggcggaggcaggagaatcacctgatcacccaggagatcaaggctgcagtgagccatgatcacaccactgcattccagcctggttgatagagcgagaccctgtctcagaacataataataataacggtgataatgatgatcatgaagtagtaatagcgagtagtattcgagttcatgattgagtattcgagtatagcgagttcatgatcatgaagtagtaaaagggaataagggagtacatgatgagtgtacacaacacagtaaaataatctggtaaacatagcagtgtgccaggcaccattccaaatatgtcctgtgtatggactcacttagttctcacagcaaccccagcacaccctggtaaggagggttctcttaagatcctgttttccacccaggaaaaggtcccaacccaaagaaggcaaacaatgccccaaattcgtacagctggtgaacggcaaagatttgtgcccaggtggactggcactggaatctgtgcttgtggcccccacgctgtggtgacggagaatccagggccatgttggggttggcattatgtttatttttatgtttattttatttttcatgatctgtggtactggtttcccat[131 bp omitted]ggccaacgtggtgaaaccccatctctactaaaaacacaaaaattagccaggtgtagtggcaggcacctgtagtctcagctactctggaggcagaggcaggagaatcacttgaacccaggaggtggaggttgcagtgagccaagatcgttgccacacccttctccttagtgaaaagagtgagagagttaatattgaagtaaggacgcatctttgaggacaggtggacaggtggaagcggctgggatttcagacacagggctgagggggtcacagcatgggctttggggtcagattcagatatttgccaactgtgtgatcttggacacatggcttcacctcaccgtgcctcagtttcccttatctgtaaaatgacttcctagggttattgagacaattaaaagggttaatatgagtaaagagcttagagaactgccagcacatagtgaacactggtaaatgttagcaattgctactattgttgtttaatacttttactagttatatgaacacttgctgtttgcctggcatgcaactcaatgactcaccaatttctcactacaacttctggggataagtgattattatttccattctacatctgagagctctaagactcaggcaggtgatgtcatcagcaggcagcaggcagcaggcaacaggcagggctgccaggaacccttgcataggttgtgcactgcacaaggacaccacatctcagggttaccactctctctgtagacctgtgtatttattattatgattttctgctaggtggaagtcaaatgtctcaagataggagtgtctctctctctctctctctctttcttctctctctctctttctttttttgagacagagtcttgctctgtcacccaggctggagtgcaatggcgcaatctcggctccctgcaaactctgcctcctaggttcaagcgattctcctgcctcagcctcctgagtagctgggattacaggcacctgccatctgtaatcccagtgctttgggaggctgaggcaggaggattgcttgagcccaggaggtcgaggctgcagtgagccatgttcctgccactgcactctggcctgggtgacactgcaggcttagaaatgaaaacaagctgtgttaaaacatacatgttatgaaactttggacacgtgacttggcctcattttccccctctctaaaatgggataatatagaccctacctctctgggctgatgaaacattaaagaaaatggtgcaggaaggcgcctagtatgcgatgagctcttggtacgtggcgacttccgttgtggcttttttgtttgtttgtttgtttttgagacagagtcttgctctgtcgcccaggctggagtgcaatgacatgatctcggctcactgcaacctccacctcctgggttcaagtgattcttctgcctcagtctcccgagtagctgggattacaggtgcgtgccaccatgcccggctaatttttgtatttttagtagagatgaggtttcgccacgttggccaggctggtctcaaactcctgacatcaagtgatcctcctgcctcggcctcccaaagtgctgggattacaggcatgagccactgtgcccagcctattgtggttttttttttaaagaacagagagggcagggtgtgttaggggccatggtagcagctggacagaggtttgtaccaggtggggcaggccagcgggggctggaccagcattgtctctctcacagaatacatccagcctgtgtgcctcccagctgccggccaggccctggtggatggcaagatctgtaccgtgacgggctggggcaacacgcagtactatggtgagtcctgtcctctgcctctgatgccaccgtttgggagactctgaactaggctggggatgggcagtctggctggttggatgagtcttgaccatgaggagtagggacgctgaggggaatggggtgggcaccaggagggaaggggggtgtgtacaccccccagctctggccagccttgcctgcacacccccaggccaacaggccggggtactccaggaggctcgagtccccataatcagcaatgatgtctgcaatggcgctgacttctatggaaaccagatcaagcccaagatgttctgtgctggctaccccgagggtggcattgatgcctgccaggtgagggactctgtaggggcagccccctggtcgctgccaccccagggatggagatgcaggggagtgggtggtcaggctccccatctaaaagcctgagggctctggggccacagcccatgtcatcccggggtgggcctcctgtccaaccactttggccttcagccagacctccctctcccctcccagggcgacagcggtggtccctttgtgtgtgaggacagcatctctcggacgccacgttggcggctgtgtggcattgtgagttggggcactggctgtgccctggcccagaagccaggcgtctacaccaaagtcagtgacttccgggagtggatcttccaggccataaaggtgaaagttgggtccagatgggagccagggtggggacgtttgggtgtctaatgggggaagggaggcagagatttgttttaggaaacctacgctcaggcctagaagagggccccccttgggaacagatggactttgaagggttcctggggaagggaagccagtggtgggacgtggaagcctctcagacctcgggagcccccagctgtctttccccagactcactccgaagccagcggcatggtgacccagctctgaccggtggcttctcgctgcgcagcctccagggcccgaggtgatcccggtggtgggatccacgctgggcctaggatgggacgtttttcttcttgggcccggtccacaggtccaaggacaccctccctccagggtcctctcttccacagtggcgggcccactcagccccgagaccacccaacctcaccctcctgacccccatgtaaatattgttctgctgtctgggactcctgtctaggtgcccctgatgacgggatgctctttaaataataaagatggttttgattaatgtggcctccgagcttacaaatgtacacagcaatgaggacattttgtcaggaaggaagagaagaattaggacctggcgcaaatcagacagagagtgtgggtccctcagttcccactgatttgagatttaagattttaattggttcacttaactggaattttcctggagcaaattggcttcaggtacagctggatccagctgctctctcaaatctgccttaggctgtgttagcttcatttccaagcagcctctcctacaaccagagagagagatgtccccttccacacaaactctttcccaatcactgcagaaaaagtcccaggcaacaacaacaaaaacccaggcccagctcccattgtacagatttgggtcacgtgctcatcccttggcaaatcactgtgcaccggatgtacgcggtaggggtggagcggggtggagtgggaggcgctaggccttcaagaatcgtgtgacctgagtgtgggagtcccaaaggaaatagggtgctatttccagaagtggaaatagatgctcagtgagcaaaaaagacatctaccttgaaccaacacggaaaacggggccctgtaaggtggagatagggagacgctgggaacacagcctgagaccctcccccaacccctttctccatctgggcagcttctggggaggaacccccttctgtagagcctctgcagagcctcatgcagccccgatggccaccagggggcactgctgccccaacattgtgacacattaaggggtttcctgcctggagtcagccgcatgttgctgaaaacctgctgttctgctgaagaaaggctcagcgggggagcctgttcaccatgactttaaataataacaattatcatacatcacccatggaccacagcttccaagcaatttcctttttttttttttttttttttttgagacagagtttcactcttgtctcccaggttggagtgcagtggcgtgatcttagctcactgcaacctccgcctcctgggttcaagcgattctcctgcctcggcctcccgagtagctgggattacaggcgtgccccaccacgcccagctgatttttgtatttttagtagagacgggctgtcaccatgttggccaggctgctctcgaactcctgacctcaggtgatccacctgcctcggcctcccaaagtgctgggtgtcacgcgcatccatgtgaagagaccaccaaacaggctttgtgtgagcaataaagctttctaatcacctgggtgcaggcaggctgagtccgaaaagagagtcagtgaagggagataggggtggggccgttttatgggatttggataggtagtggaaaattacagtcaaaggggtttgttctctggcgggcaggggtgggggtcacaaggtgctcagtgggggagcttctgagccaggagaaggaatttcacaaggtaatgtcatcagttaaggcaggaaccggccattttcacttcttttgtgattcttcagttacttcaggccatctggatgtatacatgcaggcttgggctcagaggcctgacactgggattacagatgtctgctgccacacctggctaatttttgtatttttagtagagacgggtttcaccatgttggcaggctggtctcgaactcctgacctcaggtgatccgcccaccttggcctcccaaagtgctgggattacaagcctaagccactgcacccagcccagcttcctaaaatatagatgatctacaagagctcctttgagaaactgacaaactgtgcatttggaaaacgatcccagcgtcactccccgatccccacacccctggcgaggttgagccccaccactgctttgttggtcaggagcccccaggcccacatcgtgttagcagagcctcagtgcagtttccccaaacgtctacctctggctgtggtgttctacccatggcatgtgggatgtaatttgagacctgacctacggcttgctttgttagaaacgtattgagttacaacacggagtgactgagttttcctttgtaattgccagctgagaaatgtactgtacctgtgttttaggaagtctggggactctgagagaacatggtccaccctgggggttctaaactgaggtgaccatgtcctggagggacacagtttgctctggtgaggagaagggcgggtgtgaggggcactgaagaaggcatggccctgccctgggaagtctgggggggatgtggccttattctaggggatctgatggaaatttggtcattaaaagccaacaggcatcctgctgggaaaataaaaaccaggtggccatgttattggaaaggggtcctgatccagaccccaggggttcttggatctcgtgcaagaaagaattcatggcaagtccacagagtaaagtgaaagcaagttgattaagaaagtaaaggaataaaagaatggctactccatagacagagcagccccgagggttgctggttgcccattgttatggttatttcttgatttagtcttgatttattatttagttatgctaaacaaggggtggattattgacgcctcccctttttagaccatataggataacttcccaacattgccacggcatttgtaaattgtcatagcgctggtgggggtgtagcagtgaggacaatcagaggtcactttcatggccatcttggttttggtgggttttcccgacttctttactgcagtctgttttatcagaaaggtctttatgacctgtatcttgtgccgacctcctctctcatcctctgacttagaatgccttaatttaccgggaatgcgggccagcaggtctccgccttactttacccaggtcctatttaagatggagttgctctggttcaaacgcctctgacagccattctgagttctgtctgcactgttgctttgttggaggagtggaggggctggggagattgtgattcactcaacagccattcactggtttcccttgtatgccaggggtcagtgagcctcagtttctcctcctgctcccagcaaccttgccactcaccccaaagagctaggaagatatttaaaaagaataataacagtcacaaggttgctttcagttcctgccagggtctcagtcttcagaaaagctgaatatgaaaattacttccatgtcattgtggtgccgctcagaatcagaaatatttgacccatcttacagaattagtgcaactacatcaggaacccaagccaagttttgcattcctatttagcatttatatctacatagtccttttcaaatatagaaaagctttctggatgttagttggaacagatagctccatatgtggttataagttggcattctcccagctgggttgaaggagaaatgtacagctactctgccacaacagttatttcatacataaaatcacagccatgattagcaatgatggtgaaggctattcattttatattcagaaataattattgtgaacattcagatagcagcataagtagggagatggactttagtttctgcataaaaagtaacactgtttcaatcctgcagttatgaagcgaggagctgttttggctcttgctgcatgacataccacccaaagctagtgggtacagtaaatgctcatggattctgcagctcagaaagttggacagggaacagcaggcacagcttgtctctgctccctgatgaccaggtccttagctagaaagcctaaaggaacagggactggaatagggaggcttcttttgtttgtttgttttgaaacagggtcccactctgtcgcccaggctggagtgcagtggtgtgatcatggctcactaaaacttctaccacctgggctcaatcgatcctcccaacttagcttcccaagtaactgggactacgggtgtgtgccaccatacccaactaattttattttttttttgtagagatgggactggttgcccaggctggtcttgaactcctgggctcaagtgaccctcctgcctcggtatcccaaaaggaggctctttactcacaagtctagtatccgggctgggatcactcaaaagctgagctcagctggtactgtggactcattgtctggctaacttgggcttccttccaatatggctacccaaggacatttgaacttctcacgtggtggctcatggctccagagtgagcattccagcagacactggcctttacaccccagcctcatttctgctccactctgtcagctgaagcaatcacaaacctgtccagaccctagaggaggagatggagaccccaccctttggtggtggaaggcaggtcaaaaaatttggggccacatcttaaaactgccctaggagcttatggactatcggagcaaattaacagctgacaaagcagagaaatgatccctcagtaaggtgttcaacctgaaatatttccctgctaaaattgtggataataaaattatgacagtaataactttttagaacactttcacatttgttcttacattacagaagttcattctaagaaggtgatagtcagctttgggcaaatctttaatttaatacttcactaattagcatttggccacaatgcctgtttcacttctaaataataataataatttatattaataaacatatccatgcatatttttgagcacttcctatgtgacaggtactgtactgagagttttatacatgttacttcagtatttccccaaattcagatgtttgaaagtggctgtcttaatttttgctattcattcattcaaataatatttattaagcacctattatgtgccagacactgttctaggaattggagaaatataggggacaggacaaaccaactttatggagcttaggggcaaacaaataccgctggtactacttgtattgttttattcaaattatctcttttccttttgtgtgtgtgtgtgtgtgtcttttttttttaagcttagccttgactttatttatgtattatttttattgatttatttattttgagaccgggttatgagactggctaatttttgtatttttgatagtgatggggtctcgctatgctgcccaggctggtctcagactcctgggctcaagcgatccacctgccttggcctcccaaagtgctaggattacaggcatgagccactgtgccctgccagccttgactttaacaataatgtttatgaaactgtgggtttgaggccgggtgcagtggctcatacctgcaatcccagcactttgggaggccgaggcgggtggatcacgaggtcaggagattgagaccatcctggctaacacggtgaaaccccatctctactaaaaatacaaaaaaattagccaggcatggtggcgggtgcctgtagtcccagctactcaggaggctgagacaggagaatggcgtgaagccgggaggtggagcttgcagtgagccgagtttgcgccactgtactccagcctgggcgacagagcgagactctgtctcaaaaaaaaaaaaaaaaaaaaaaagaaactgtgggtttgatgtggcggtggcagatatatgtttttcaatataaatcaaaacaaatgtattaaataaacaaatgctagtgaaataataacaattccttcttcactgccatcctatactctcccggggtttcccgccagcagcccatgtgccgccctttgggaaacacttgtttcatcgccatgcaagctgggaaggagggtctgtggggtttgctgtcctacagaggggctgcatatcccgtccaaggtccacctccgaggggcagggctggcgctggggcctggggctggaacagctcgggatatggcactgagctctcattcccagcctctctctgctgagcaggttcggacactttctccctggcggggtggtgggggggtccctggaccgctagggaagtgcatgtgtccagatgctggcggtgttctggagaaaaagatgggatgccttaacccagacactccttggactggtggtgcaaaaaggagccttcgaatgaggactgggcccaggtgtggcaggccaggtctcactaacgcaggcctccataacaactgtttcagcaccgactgagtggctaagtcaaatattaaaagctgatagagccagtgccctatacaaaagctggaatgtaacaaaagcctaccaagagttttgctcaggcctttcctgggctttaaagcatgacaagataaagaatgaattcttaacaggacccttttaggattaaacaagtttaattgggggtctgaagaaactacacttacacacaggcatatagcttagaaggtatataagctctggaaaactttgtaattttgagttggtctggggacaatttccaggctttcaccctataaccagttacagaaataaaaactcccttttcgctgggtgcggtggctcatgcctgtaatcccagcactttgggaggccgaggtaggcggatcacctgaggtcaggaattcgagacaagcctgaccaacatggagaaaccccgtctctactaataatacaaaaattagccaggcatggtggtgggtgttggtaatcccaactacttgggaggctgaggcaggagaattgcttgaacccgggaggcagaggttgccgtgagccgagacagtgccattgcactccagcctgggcgatagggcgagactccgtctcaaaaaacaaaaacaaaaacaaaaacaaaaacaaaaaaaacctccctgttctcccagtttatctgcatctcatcactgggccatgagaaatagcagcctaatcctcagtttggtccaggaacacaggtgaccctctgtcccatgtggtttgaccaggtaaagggctgtctggggtttgagggtctggagcacccctttgggacactgctttgaagatggagtccccagtgcctaactctgagcctcctccaccagggtggtccgtgaatctcacaggtgcacagtaacgagcccccttgcctgtatgctcctcctccccgtctccccgttcacgtctccaggcgaatctccccttctgggtccagtaacactcctaaatgcctgaccttgactatccaccatggcagccccagccatgccctgcagatgcccacccctgggcccccggggctggccagcagcccacgagtctccccagccacacatcttggccctgcttgatgcacatgcactccgttcctggatgctgtgtgctcatctctaacctgctccaagagaaccagcagggccccatgggaagaggctccctgcatgttcagctgtctgtcagcagcggcccttcaccaagcagtggctcaactttcccactgtggatcgcttgacttgtgcccagccctgctaatgggtggggggttcctccagggtctggcaacccggccccctgggaaagccctggaagatttccatcccctctttcctcccttgccctgcccaccaaccccagacctggcccagcctcaggcagaccggatgggaaccaggatccctgggagacccccaggccccctggaccctcgaacaatggaaggtgagctccagctgccccgtccccaccctggccccacctctgccctggtataagcccgcctggcccgcagcacctgcagccaccatggggatactgtggcttctgctggtgggtgagtaggagtggggactctggaagggggtcgactgtgccacgtgggccccagcccttagctgacatccttcccctcagtcctacagaaccaagtgacttggagcaaggagatcagaggtgagaatggatgtgctccctaacctggagagaggacagggccatgtggacaggcagggagggctccaggggtctgaggagccatggccccaccctggagtccctcaggggacctggagctttctcttggggactgaggggacacagccctgccctggggctctgaggggagcctcagtggtctcgtgtccccagcctcgctcctgtacccctatgggctggagtgtggggatcaggccctccctgcagaggatgatgacttctctgaggagctgcggctgctggagcccttcatgctctttgaagccacacacgggacggcctatgtgagtgccctggccctgaccgtgcggtccctgggctctctctcttctccccaccccactcttgactcggagcctgtctatatctatagctcctggctccttctggcttcgtcctctgtcttcctggggcgggccctgtccctcttctgtcccctgccctgccaacacccccctgcgggtcttgcccttcctcacttcccccagttctgcaccaatgggctggtgtccttcggggagcctgtggctctcttcacactggaggcatttccccaggagatgggccaggccttcgcagtcccgttctgggccaatgggtccacactgagcaggggccagatgtggtaccggcagagccgccagccagagctgccgcagcaggtggcctgagacctggcctcagccttcccccatgccccgcccaccccttgcgccctgctggtggccatgtgggaccaaattccattttacggggcacttggtccccaggtgaggaagcgggtggcagagaagggcccaggctgaggctgtttggcccaaccccttgggaagaagggcttggattcctgggtaaggaggagacaccacggaggagagacggagatgggggaacgagggagagatagagggggcgggaagagagagacagagagacggaagcatggagatgcagcgaggtagagaaaatgggtgagaaagagggaagacacgaacagggagagaaatggcgagagagaggaggcaagacagcaagcgagaggagtgagatgatcagatggagagacagagaataggaaaaggagagagacggagagagagaggggatgagagcagagcagaaaaatcgagactgggggatgtgaaaggaaggctggcacaggtgccagcagaggcagctgtggacatggtgtggacaggggcctgggaggtggcgtggatgggggtctgggatgtggcatgggtaggggcccgggatgtggtgtggatgggggcccaggaggtggcacagctggaagcagccagcttagtggtgcagatggagctcggttgaggactgggcagtgaggagggtcctgggtgcccctggaccagcccacgacaccctggctcctggcgcttgccctgcaggtgaacaccttccaggaggtgctggccctgggcagcggcccctcctgggtgctgtttcaccacaaggacatccagtggaccatgggggtggccagcggtgggagcccccaccacggcctggggggcattgcggcccaggtgagtggggaacccacaggggcctccctgggtccttggggagggtgaggacgcaggtgggctgaccctgttccaaatgacacccccaggcaggcttcaacagcggccgacagagggactacttcacccttcctggctcccggacctcaggcatcctgaatgtggcagacaccagcaatgtgggcatccccaggcactaggccttctgcatcaacagctttgcagtccccaacggctgcacctacaatggtgaagggtggagaacctgccccagacctgcctgctcccagggcccagccacagagcccaggagcccaggccccacactctcctcctccaagacccaggagtccagtcagccctcagtccattccatccttagatccaggaatcagaggccgggcggggtggctcatgcctgtaatcccagcactttgggaagccgaggcaggcggattacctgaggttgagggttcgaggcttgaccaacatggagaaaccccgtctctgttaaaaatacaaaattggccgggcatggtggcacatgcctataatcttagctacttgggagactgaggcaggagaattgcttgaacccaggaggcggaggttgcagtgagccaagatcgcgccattgcactctagcctgggcaacaagagcgaaactctgtctcaaattaaaaaaaaaaaaaaagatccaggagtcagaacccccagtccccaccttcctcaggacctgaggttcaagcctcagccccagacacccccaccgcagcccactctctccacagcccagttcctgcccctaggtgcctctttgtggaacagcagtgcctgcagccaccacactgtgggcaggaaggccgggtgtggtgctggccagagggctgccaggtggggcagcagtgtatgcctgcacaccccttcccacactgctgggcccctcgtggcccctcctgccacctgggtccccagggccacccgcacacactctccagatggcagctgtggctccagccctgccacttcgtcctggccctgcttcctggcatctgcgtggaggtggagttgaggaggggaggcccggtggcagaggccctggtgcggctggtcatccatggctgggatgtggtagtgagatcgcatggcccaatagaacacatcctggtgagtggggctgggagccgggctggaggatagaacccggacagccgtggagtcgcagacacactaagtgcccacagccccagagactgccacagagactggcgggcagagtcaaatgttagatggacaggcaggcagacagacagacaaaatgaataacaggcagagagacggacaagaagacagaccagctggccaatggacaggaagacaggagggttggacaggtggacaggttgatggaaagacagacagagtgacgttgggatgaccagagcaggtggcaagacagacggcagaagggggctagatggacagaaggacacatggcgagcagatggcgaagcacttggtggactcgctgaggccgacgatggtcgcaggcagacagagcctcccgggctctcatcctagccatggacctcacattgcccaccgatgcagccctccggggcctcagcgccacctgtccccttgaccccacctttctctgttatacaacccagtttctgccgcccaccctctggtttcctgactggttgacctcactggccgccccatctgctgagcctactgagcctacggtgcttccccacttcttaccttctgggacatcaggctccctctcaaatccctgcttgtctacactcatacctcctgcgctccttcctccaataccccacaggtgaaccacacctctccacttgcactcacccctgcatgtaggcagcagagcacacctgggctggtgtcgtacctgtgactgtgaacttgaaaggaccttccttccacctccctggcaccctcactcacctcctctccctggccacctgttcacacctactcctctccctttagaccaaacctcctccctggaactcattctcagcctatgagatcgcttcctacttcactggtagcatcagctggaacctgccaggcactccccaaccctccacctacagtccaggctgccatgatggagggtggtctgtgctccttcctggcttggccacctctgtgacagttcctgcatctcccagcaatgcttcctctccctctcctctatatccgtgcttctcaaagtgcagctattagaccagtagcatcagtagcacctaggaatgtgtttgaaatgcaaattcttgggtcccacccaagaccaccactctgggtgggtacatgcaatctgaattttttttttttttttttttttgagacagggtctccgtcactcaggctggaatgcagtggcacgattttggctcagtgcaaccgcctgccttggcttcccaggataatgggattacagggagtgcaggccagcactcctggcttgcagtctgtttttgctagcccttccggggattctgatgcatgctgagctccaatgagcttcaccatcaatttgctatttttttttttctttttgagacagagtctcgctctgctgaagtgcagtggtgcaatcttggttcgctgcaacctccgcctcctgggttcaagcggttctcctgcttcggcctcccaagtagctgggattacaggtgtgtgccaccacgcccggataatttttgtatttttagtagagatggggtttcaccatgttggccaggctggtctcaaactcctgacttcaagtgatctgcccacctcggcctcccaaagtgttgggattacagatgtgagaacctgcgcctggccaatttgcctttttctaccagatccttctcactgcattccaataggctacaattttgccatcttcaaaaacctttctcctcaatccttcctccgcctctagccactacctcatttctcacataccctgtacaagaaaagcacacagaagagttgtcaggctcactgcctccaatgcctctcttctttctttgagagacagggtctcattccatggcccaggatggaatgcagtagtgcagtcatggctcactgcagccttgacctccaaggctcaattgatcctcccacctcagccttctgagtagctgggaccacaggcgcacatcaccacggctggctatcagttcctctcttttcattctctctttcggaccttctctagtcaggctttttccgccttcaacttcatgcagccaaaactactctcgatgaggtccccccaggacagtagtcaatcttcaggccacatcctgattgaccgccagttatgtctgacacagccctgtccctcccttctccatgagacactcttcccaatttccaagaccccacattctcccggttctcctccagccatgcgtccccatcagcccacacgctaaacactggagtgcccagggctcagcctgccctcctctcctccccaccttcacccattcctgggcactcacccaggctttctgatggaaacacaccaatcttctcctacttttcctcttaagaattttacctgaccgggtgcggtggctcatgtctgtaatcccagtgctttgggaggctgaggtgggaggatcgcttgagtctaggagttccagaccagcctgggcaacgtagtgagaacccatttctacaaaaattttaaaatttgccaggtgtggtggcccgtacctgtagtcccagctatgtttcagagcctcatggcatcttctccttcttgctgacaagtgcatttctatctgaatgcctctcgctgggaacctgcgccatcacactcaccccatgccaaggccccgaccccacagcagggccacattctgcacctgggaccgcaggagctgagccccaactgccgtgagctgtgtgagtgcaaggaggctgggcagccaccccactgcagcccccaggcgtgtgaggacggggaggcctgcttcctgctcaccggggcctggtactgtggggtccggagaggtagcagctgggtgtcaggtgacccccattaccacagcttcaacagcacagccctcacagcccagggtgcctgtcactatgtgctgagccgcacctgtcaggccggcctgagggcacaagctttcacagtgtgggtggacaatgagtacctaagtcccacggccctcatgactggggctcggccgatcgaagtggacgtgcacggggtgaaggtgatgatggaggctcagacccccgggagggcacaggtgagcttgggcaggggctgggatcaggccccagaagggcgggcttagactcaggaatccggggaggacccattcacatcctaggaagacttgaggggacacagcctcaccccaaaggttctcagggattcccagacccacctaggggtgtttgatgtggacatggccccgggtgtgtctccaggttaacaggacccaggcccacctgcccctacgcctggctggcggccaagtgcacgtctatttcagcgattctggggccatgctggagactgacgctggcctcttggtctcctacgactggagccaccatgtatccattatggtgcctgagtcctacgctggcaccctctgcagcctgtgtggggacttcaacggggacccccatgatgacttccatgcccctgatggctccctcctgcctgacccggaggtgtttgcactcagcttgaagggcctggattccccagccagttgctccaccgtgggcactgcccctctgtgcccccatgaccgagagggccggtaccagtcactggctttctgtgggctgctgggtgcccacgatgggcccttccaggcctgtgatgagctggcccaggcccaagtccacatggagaactgcatccgtgacctctgtgccacaaggggttcccggcagatcctgtgcgaggctctggggagctatgtccagcagtgccagcagcacggcctcctagtgaggccctggagacacctggtggactgcggtgagtggcatcctctccatgccagccagcacgttctgccggccaggtccagaaaaccagttccgcccattttgtggggttgcataattaatgatctcagagtagctacttcaggcctggcccagtgaggcgctcgacatcactggccttggtttcatgcttcccaccaaattggctccacatccagacaggctcaccctgaccacagtggctccacaccttgcagccactcaggtttctcagcccagcaggaaagagagctccgtgggtctcagaagctccagcatgatttgcactgcgtctctgtggcttcaactgactccttcttgtacctctcactgtggccaggggaatgtgagtctccgattgacttctgcctgaccgcgggctctgcccttggggagactgcccaggcagaagttgggatgaggttagcagtgggcagtagtactggctggtgcccaaaggacaaatgtctgcggcctctcacccttgtcctgctgccaagtgatctttgtcaagagcattaagcagtctttcaaacatttttgttggagacccacaatacaaaatatagttcatttcaggatctaattctattagttttctatctcttgctgctgtaacaaattgcaacaaactcagcagcttaaaataaca[137 bp omitted]tacaagcatgcaccaccacacctggctatttttaaaactttttttgtagagacagagtcttgctatgttgcccaggcagttctcaaactcttagtgtcaagcgatcctcctgctcagcctcccaaggtgctgggactacaggtgtgagccactgcacccagctaatttttatttatttatttatttattttgagatggagtctcactctgttgcccaggctggagtgcaatggcgcgacctcagctcactgcaacctccaccccctgggttcaagcaattctcctgcctcagcctcccaagtagctgagactacaggcacctgccaccacagctggctaattttttgtattttcagtagagatggggtttcaccatgttagccagatggtcttgatctcctgacctcatgacctgcccaccttggcctcccaaagtgctaggattacaggcatgagccacccctcccggcccaactccagctaattttttgaaaatgttttgtacagatggggtcttgctatgtcaaattttttcttacaattccaacacagttctcgctggcctaaaaatcaacgtgtctgcaggagtgcatttctttctggaggctctaggggagaactgtttccttaattatttaaattgttggctgaattcagtttctgatggctataggactgagggccctgtctctctgctggctgtaacctgagggttggtgtctacttctagaggccacccacattccttggctcatggccccttccatcattttcaaggccactaacagcaggtcaagtccccattatgcttcgaaatcccctgcctctttctgatggactctctggcctctgtctcccacttttaagagcccacgtgattacactgagcccagccagataatccaggttaatctctcccttcccaaggtctagaaccttaatcacatctgcaaagtccattttgccatgtaacgtatcacaggatacagcgattagactgtggacatctttgaggggctgttcttcagctgaccacaccaatatatgcatacacagcacacaaagtgtcaccaaataggaaaatgcactcaatactttgcattacattcttttctattctatttcatttttcaaagcagggaattatcccactgatctgtatagcattgagattgagaacacagatcccaaagtcagcctgccttggttaggatgccagtaccaccactttcagctgtgtgctcttggggacgtcacttaacctctccgtgcctcagtttcccctttaacaagagaaagaatggtgaaaataacacttctcttgtggggttgttgtgagagccaaacaaataaacagtagctggcaatatagtgaatatagtgaatgctctacaagtattagctgtcactatgaaattgattttttttttgaggggggatggagcctcactctgtcacccagactggagcacagtggtgtaatctcggctcactgcaaaattcacctcccgagttcaagcaattctcatgccttagactcccaagtgtctgggagtacaggagcatgccaccatgcccagctaatttctgtattttcaatagagatgggattttgccatgttggccaggctggtcttgaactcctgacttcaagtgatccacctgcctctgcctcccaaagtgctggtgagccaccgtgcccagcctgaaattgacttttaacctgtgttaacatcactctgtcctgagatcaaaaccacagggctctgctgttggcaggtcttgtcccagagtctgggtcagcctgtcctggggagggcctgggatcagcccggcccacaccctctccagtccagcaggcagctgagatgggtcctgagccatctttttatccctttggtgtgaatgggacaacgcgaccatttcacagatgaagagcagacacagagccgcacagctggggagtggcagggaggggtccccctgggcctgatcttgccctgggtgatgcaggggccagggcaggactgagaagtgccgggtctctgacctcgtagggcccacacgctgccagggtggccgagtctgtggtggggcagccacggcagagtgatcagggctcacatgagggaagcgtagggccacaggggagcacagaggaggggctggcccagcctggaaagtcaggccaagtttcccagaggaagggccacgagagctgaggcttgaatgacaagtcaaagccaataggtaagcaaggagaagccaaatgttctagggagaaggaacaaggttttcagaagcccagagactgtgtaaatttgagccagagatgggggagcctggagagagacatggtcctgggctgtgtctgtggggccttgaatggcaggcaagaagtgaggactttatcccgaaggactgggcctctaacctccaggaccccaaggcgcaactccttttctctgcccctagtccctcactcctctcagagcaggaagcaagttcagcatcttgcaaacaaaacctctctttgtccaaaggaaacagcccattgcaagctccgaaggccaacacaagggactggtggtgggtgctctggcctctggcctgcctggcccacccctcctcccaaagccagagacaagccccgggggcatcacacactttgactaaggttaactgaacacccactaagtgctaggcagcattctaggcgctgcagacacagcagtgacccaaacagacaaaaccttgccctcatggaggcgacattccagtggagaagacaatcagtcaacccagccagtaagtaggtgattaaacagtaagtcaggcggggcagggctggggagtgctggagaaggggcatgcagtattaaactggggggttagggttccctggggtgcagagaggtgccctgggagtggagactgaaggtggtggaaaagggagccgagctggctgggggagcggggaggcggggggacattccaggcagcaggaatccaggaaacccatccaggaagggtgcaggtgtctcctccagcccccagactctgggtgctcaaattaagatgaactttgagctggaatatctcccacatcccacccaggacatttctccttttctgactttctttattaatcctgagactgggggacacccccactccgccagcgcacacacacacacacacacacacacacacacaaaaccctccccagcaatctctcctccagtatgtttttcccctgatctgtgaaacccccaaagacaagggttagggatggggtctctcttggtcaccagtgtgtcaccagaacctaccataaggcatttaaaagcataggttagggctgggcacagtggctcacacctgtaattccagtactttgggaggccgaggtgggtggatcacttgaggtcaggagttcaagaccagcctgaccaacatggtgaaaccttgtctctactgaaaatacaaaaaaaaaaaaaaaaaattagctgggtgtggtggtgtgcactggctgaggcgggaggatcgcttgaacccaggtggaggtggaggctgcagtcagccaagatggtgccactgcacttcagcctgggtgacagagcaagactctgtctcaaaaacataaaaaaaatgaaaaagcataggtcagatctcatcagattcctgattaaaagcatccctgggtcccccttacctctgggatgaaaactgacctccaagcctcctcctaagaggcccccacagcggcctctctctgctcaccctgcctcctcctacactggctttgtctagctcactccacaccgagggtccagccacactggcctctctgctgtccctggaccacgccaaatgccttcccacccctgggtctttgcatctgctgttcccccggcctggaatgctctttcccagacgtacacacggctggctccttccatcattcaggcctcagctccaatgtcacctctgcagagaggcctccctagccactgtcctcaaatcagcccatggggctcagccactctgcgctacctaaagctgggtaacacagatctaacccagtttctcaatccaaaattatcttttatttattgctagtttgtcgcccatttcccccctctagaataggccagcacacttttatgataaaaggccagataataaatattttaggctttcagggccacactctgccacaactactcaaagcttctgttgtaacataagaacagtcatagacaatacacgaaccggcgagctggctttcatgaagacattatttatagacaccggaatttgaattttacatgattttcacacctcacaaaatttcctcttttggtttctttttttctaaccacttaaacatgtaaagactatttagattgtaggctgtgccaaaacaggtggagggccagatttgggcccaagggtgaagcttgtcaacgtctgccctagaacatctgttttatgaggtcagggatctctgtcttggtcattgctgtgtccccaggccctgggatgttcccggcatgtagtggatgccaaagttgaacaaatatgtgctatagaaaaggcttcgacacattcattaattcttccaacaaatatccattgaggtttgccgtgagctgggctctggggagatagcagggaacataatttgaacgtggggcagtgagttgacatccttgcattgaatgacttgtgttcctccagagctgacctggccccccgacagccactacgagctgtgtggcttctcctgtcccagctcctgcaccgagcctgccctgcccgacagctgtctgacaccatgccaggatggctgccagtgtgacccaggatttgtgctcagtggcacggactgcttgacccccatccagtgcagctgctccatggggggcagataccacctggccggggagccattctgggctagggagcactgtgagcaattctgccactgcgaggcttccacccatgctgtgtgctgctccccctcctcctgtgggccagggcagagatgtgggaccctaaggggcatctttgggtgccacccattctcccctggcacctgccaagcagccgggcactcacacatcatcacctttgatgggaaaactgttgagttctcaggtacctgtgtgtccgtctttgccgaatcctgtggctcttccggctcactgccattcttcaggatacagctgtgaaaggagaacagatccagcagccccctcatgctcatcttggaggtgtctgtccaggttaatgggacccaggtccacctgcggagggacagcccaggcatggctcagataagcaccagctttgggacgtgtcgtttctaggaaccccaacccttcacccaaacccataggcccaagggaaaaacttattctgtctccattatttctacattttacctctattttctgattatatgcccatttttgactatatccatcagatgcattcagctaatataacagaaacactctcagaccagcttaagaaaaaaaagaattactgatttacacaattgaaaaaaaaaatctacaggtgtatggattcaggcatagctggacccaggtgcttgaacaatatgtctcaaatctgtctcaatttctgggctctcctttccttcattttcagacaggcaccatcccatcccaccttgtagggacaaggacagctgccaggttagcaaatgtcactggaggaaaagtgtccctcactggcccagcttgagtcatgtgaccacccctgaatccctgatggactagctgattggctgggcctgggtcatgtgctggaagttaggataggattgactttctgtgaaccacatggattgattttggaggggtgagttctcagggaaatccagagaaaggagaaatgaatgcagaacaggataaaacaagagatggtcactattatagttatgtccttgttccttcatctaaaaatgttttacatgtattggtacggtggcttacatctgtaatcctaacactttgggaggccaaggcaggtggatcccttgagcccaggagttcaagaccagcctgtctcaagcaggcaatatagcgagaccccgtatctaaaaaagaattaggtgggtgtgttggcgcacgcttatagtcccagcttatagtcccagctacttaagaggctgaggtgggaagatcgcatgaacacaggagttcatggctgcagtgtgccatgattgtgccactgcatccagcctgagggtcagagtgagaccctatatcaaaaaaaatcaacatttttcacgtatttgaacacctactatgtgccaagcaacactgacccaactgtggtcctatgctcccgagccttcctttgattctgcctgctccttaggtgaatggtgagacaacagccctccccgtaagcctgaatgggggcagccttgccgtccactggaatggcctcttctccctgctgcagtcagactttggcctctggctcagcacagatctcacctacagccttaccctcaccctgccccacctctacaagggtcacacctgtgggctctgaggcaacttcaactgcaaccccagtgaggacgctaaggctgacattaccttggagaagcagagcaaggcttgtagggacagctgtggggctgcctgtccagtctcagtctgcaatgaccaggggcagattgtgtcagccaggaggcagtgctggctcctgcaggacccccaggacccttcagccactgccactgggagatcaacccagacccatatgtttccagctgtgtcgatgatttgtgtcttgctggggatgatgaccacatcctctgcctggccctgcagacatatgccgccatctgccagggcgccaacatcaccatcaggcactagaggaattcttccttctgtggtgagtcatggttgagcagggcaggaattcatctgcatgctctgtatggccacacacagactgacatccttctgtactcctgggctgcctgagtgccccaaccacttcccatattcccaattccagcacaggaaggccttccaggttctcctcctaggctccagctggacgcatgtggattggtagggggcctgtatgctaccgactgttatgtttttttttgttttttgttttttttgagacagagtctcactctgtcacccacgctggagtgcagtgacttgttcttagctcactgcaacctcctcctctcgggttcaaactattcttctgcctcagcctcccaagtagctgggattacaggtgcccgccatcacgcccagatgattttttgtatttttagtagagatggggtttcaccatgttggccaggctggtctcgaactcctgacctcaggtgatccgcccacctcggcctcccaaagtgctgggattacaggtatgagccatggcacccagcccgctatgtattttgaataccaccctgggttgactggatccctggccccctgtcaaggggatgtccttttccaccctcagaatgcctgacctgagatgccacaataataatcccaacaactgctaatacttattgaacatctacaatgtcccaggcatggggccgaaggctctgtgtacctcttgccgccactgtctcagaaacaccctgcaagtgagaggcaatgactgttattattcccactttacatttgggaaaacagaggctcacagaggtaaagccatttgtctactgctaatcacaacagacagagttgagacttgaactaagactttctttctccagagacaaaagaagttttattactagccatatcatctaattctttctttcttatttaactattatggaaaatttgaacataaaagtagagagaatagcctattgaatgcccctgtacccagaaggcagcctcaacaacagccaagttgtggccgacctgtgtccacctccacccctcccttattgatttattttgtgtaaagcaaatcccagacaacgtgtaaacctgtaaatactccagcattattttttttaatagataaggacttttaaaaagaaaaaaacctgctgtggccgggcgcgtggctcacgctcacacctgtaatcccagcactttgggaggtcgaggcaggcggatcacctgaggtagggagtttgagaccagcctgaccaacatggagaaaccccgtctctactaaaaatacaaaattagccggcgtggtgctgcatgcctgtaatcccagctactcgggaggctgaggcaggaggatcacttgaacctgggaggcggaagttgcggtgagctaagattgcgccattgcactccagcctgggcaacaagagcgaaactccgtctcaaaaaacaaagacaaaacaaacaaacaaaaaaacctgctgtgatttgctcacacctaacaaaataagcagtaattcccagatatcatgaaaagcctagtccatgttcagatttttctgatcgttcctaaaacatccggctttcctcccttgcaccaaagctttgctggcccctaatgcttgcccattaagggttcctagctggttccaacattaggggcgcaatcggggcaggtcatgttctacggggtgggggtggaaggtgccgctttcttgctcaaccaacaggcaacaaaagcctgtccgataccatcctggggatcaagacacccctaaaaccaggttctaacccacctatgttagatccaaatgtgaatctctgacacctgggccgtagggaaccctcaaagggtttggaatagggaaggcggggagcggggtggagtgggggggaggtaagacagtgttcatggagtgagaaaggtgggccacctaggggctatttctggaataacaataggtcgcatttatccaaggttcccagggtgccaggcgctgtcccaaccacttaatttattttaacttgcttaaccctcaaagtcagtttgaggtcagtactcttttcggagagatgggtacggagtcctggagaggttaagcaccacgacagagccgagattttaagcactcggtcagggagttgggcaaatgtggcctgcagatcatgtttccttacccgcgctttttctcctccctgcatagccgccacgtgtcctaagcacagcagctaccagcaacgcttggacccgcgccgggtgcagctctgcgtccccgcggccgccctgcctgctccgagggctgcgccaacgataacgcgcacctgtgggcaggggccaggtgccggcacccgaaggagtgcggctcggcgcacggcggcccctcctaccaggtgagctgggggcagggtcttgctgttgtgagggggtcggcccatcatgggggtcagggagcccccaaaacatgccagggatgggcgcccaatccgggacacctatattcaattgtgcggatggcacattgtgggttcacaatgtgttgacctgctttattattgatgattccaatactgctactagttactaaggtcattccctgtgtgctaagtgcttaataatattattattggctgggtgcggtggctcacgcctgtaatctgagcgctttgggaggccgaggccggcggatcacctgaggtcaggagtgtgagaccagcctggccaacacggcgaaaccccattctactaaaaacacaaaaattagctggatgttgtggtccacgcctataatctcagctacttgggaggttgaggcaggagaatcgcttgagcccggaaggaggaagctgcagtgagccgagaaggcgccactgtactccagcctgggcaacagagcgagactctgtctcaaaaaatatatgtattattattattactgtcagcactattgactttttaaaatattagccatcacttattgagtgcatagcccccactacacactttggcaatgtaatagtagtaataataacaataatcaaaacagctcattttatttatcattaataggtacaagactctgtcctaaatgttttagcattgtggtcagtgctattttttgtttatttttatttttttatttttattttatttatttatttatttttttgacacagggtcttgctctgttgctggggctagagtgcacgggcgccatcttagctcactgcagcttcaaattccctggctcaaatgatactccccctcagtcacctgagtagctgggacttcagttgcgtgccaccatgtctggctaatttttaaattttttgtagagatgaggtctgaccgtatcgcccaggctggtctcaaactcctggactcaagggatccttctgcctcagcctcgcaaagtactaggattacaggcatcagccaccacacccaaaccatttgtattattttgatggccaacatttgagtagtgatcacacatcaggtcccatactgctaataataataattaaaatgtggccaggcgcggcggctcatgcctataatcccagaactttgggaggctgaggcgagtggatcacctgaggtcaggagttctagaccagcctagccaacatggtaaaacccagtctctactaaaaatacaaaaattagctgggcgtggtggtgtagcaggacgagctgcagacaaaacccctcagacactgagttaaggaaggaagggctttatttggccaggagcatcggcaagactcacgtctcaaaaaaccgagctccccgagtgagcaattcctgtcccttttaagggctcgcaactctaagagggtccacgtgagagggtcgtgatctattgaacaagcagggggtatgtgactgggggctgcatgcaccagtaagaacagaacagaacaggacagggattttcacagtgcttttctatacaatgtctgtaatctatagataacataactggtttggtcaggggtggatctttaactaccaggcccagggtgtggcgccgggctgtctgcctgtggatttcatttctgtcttttggcttttacttctttctttggaggcagaaattgggcataagacaatatgaggggtggtctcctcccttagtggcaggcacctataatcccagctactcgggggctgagacaggataatcacctgaacccgggaggcagaggttgcagtgagccgagattgtaccatcgcactccagcctgggggacaagagtgagacttcgtctcaaaaaaaaaaattttaaatgtattgggggctgggcacagtggctcacacctgtaatcccaacactgtgggaggccaaggtgggcggatcacttgaggtcaggagttggagactagcctagccaacatgtcaaaaccctgtctctactgaaaaatacaaaaataagccgggcatggtggcacatgcctgtagtcccagctacttgggaggctgaggcacaagaattgcttgaacccaggaggcagaggttgcagtgagctgagataacaccactgcactccagcctgggtgacagagcaagactccatctcaaaaaaataattaaatgaataagctaaaatatattgggtatttactttgtgttcatgcctgggctaagcattttatgaatagtaataataataataatggctaatatattaagagtttgggcatttacaatgtgccttgtgtaagcatattaaaataatggtgatattaacaataataatggctggtatgtaccaggcatctgctgtattgctgtgctaaccagttaatgatatataatgataaccatcgtgaacatattttggtcatttgctgcgtgtgtaatcctgtcatcgggataaaaggtaatattttctgagtgcttattatgccttgagcactgggccagcatgttattaataatggtatcagatatatgtcaagaacttggttactgtaggccagctgggtggtgagagcctcatgcgtatgaccgcactgaccttcaaacagccctttgattgcctccaatgtgcagagggggaaactgaggctacaggatgcacagagatctcaagggacagagctaggtctggactccaggtctctctgaccccaaaattgtgctgctaatcactaggctgtgctttccactgagagaaagcaggtgtcacaagtttgctgccctctgggtaaggcagtagcctgtcatgatggtcagacccccagctgttgaatctgggcatggcattcctgcccatcccatgctgagccggcccctgagcctctgctcttctgggtcagctgccaggccagcctcgggcctccaccaggccctgtttgggtccacctgggctgggctgggcagggcatgctgatctggcctccgacctggtctggctgaaccgatgcacccgccgctgcagctgtgacagaacggggcatttccgctgcagcccggcgtgctgccccactgggaagatctgtggtctgcagggtggccagctgggctgccagagccccctgggcacctgcatggccactggagatcctcattacttcaccttcgatggggccatagcccacttccagggcacctgcacctaccacctggcctatgccatccatccattcatccatctatcatccatccactcatccatccttccatccattcatccattcatccatccatccatccatccatccatccatccatccatccatctatccactcatccatccttccatccatccactcacaaaatttttctgagtatctactttgtagcaggccctgctgtaggctctggagacacagcaaagaacaaaagagacaggtctcttctctcctagagtgcacattataatagtgagagacaaacagtaaaaaataaatacataatatttcagatggtgataagtcctagaaaaataaaactagaaaggagaatcaggagtgcttgtgagtatggggtgggagttataatttttaaacagggtgagcaggaaaagcctcattgaggaggtgactttggagcagagacttgctggagggaaggagaagccttatgagcaatgagggaagagccctccaggcacagggaaccttaggtgcaaagtccagacgcagaaatgcccttagccttattaagaaagaacagggtaattccagcagtttaggaggccaaagtggatcacttgaggaagttcaaggccagcctgggcaacataggtgagacccccatcgctactaaaaattaaaaattaaaaaattagccgggcatggtggcacgtgcctgtagtcccacctacttgggaggttgacttgggaggatcacttgagcccaggagttggaggctgcagtgagccatggtagtaccactgcacttcagcctggaggacagagtgaggctctgtctctaaaataaaataaaataaaattttaaaaaagaaagaaagaggctgggcacagtggctcatgcctgtaatccaaacactttgggaggctgaggcgggcagatcacgaggtcaagagattgaatcctggtcaacatggtgaaaccctgtctctactaaaaatacaaaaattagatgggggtggtggcacatgcctgtagtcccagctactcgggaggctgagacaggaaaatcgcttgaacccaggaggtggaggctgcagtgagctgagatcgcaccactgcactccagcctgggtgatggagcaagacaaggaaggaaggaagggagggagggagggagggaaagatgaaagaaagaagaaagaaagaaagaaagaaagaaagaaagaaagaaagaaagaaagaaagaaagaaagagaaagaaagaaagaaagggagagagagaggaaggaaggaaggagaaagaaagaagaaaggaaaggaaaggaagaaggaagtaaggaaaagaaaagaaaaggaaaagaaagaaaagagaaagaaagaaagaaagaaaagaaagaaagaaagaaaagaaagaaagagagaaagaaagggagagagaggaaggaaggaaggagaaagaaagaagaaaggaaaggaaaagaaaggaagaaggaagaaggaaggaaggaaaagaaaaggaaaagaaagaaagagaaagaaagaaagaaagaaagagagagagaacagggaggccagcggccagtgtggctggagtggagtaaacccggggagagtaaggggtgaggtcggagcgttaatggggacagatcctgtagggccttgtgggtcactgtaaggactttggctttcactcagaatgggttgggagttccagggatttcagggagggctctgagcccaggaggcccctgatctgactcaggtgtcagcagatccctctggcttcatgcagtggacagatggccgaggacctggggggagcaggtagactggagaggaggctgacagaattgttcaggcagaacgtggcagtggttggaatcaggaagagggcagtagagggagtgagacatggttagattctggaaatattttgaaaggatcagctgtgggatgagagagagggcaggttccaacatgatttggtttttggcctccgcgtcctggacaagctgccactgcctgagatggagaaggtaggagaggaagcttggggtaagattaggagttcagatttgaacgtggggagttcgaggtgcctcttttctcccagagctgggacacagcaggatgcagacacctggagttctaggactggtgagggcatttgggaattgtcagaatacagctggggtttaaagccaggcaagtggatgagaaaagtaagggaagggaaacgaaggggaaggggctaaggtgaacttggcagtgtgaggtgtgaggtccttggtggcatggagcagacagctcggcttggagattcatacaccttacctgctgtggggtcatgaggagtgtatggatggcactagggggtgggagatggtagggggaaatggatcctgagctcttcccctgcactgcaggtggacagccaggcggtaagcagggcctggtgctcctgcaggtgggcacctggctccaggtacagttcaatggccacaatatgctgttggtgtgcgtggggcctgagttctggagccacctctgcggactctgtggcaacttcagtggcgaccccagtgatgacaaggtgctccccagcagggtgcccaccctcagtgatgccatctttggcaacgcctggtggacccaggacagccggcctgggtgggtggctgcctgggaccaggaagggcccgggttgggagaaatacagggctcagggaaaacagtgggcagacaggcaggctttgagaacagaaaggtggaagaagagggtgtgaattgcacacacaactctcaggagattgattcaggtagaatcaggaacaatgattataccctttcacggatggggaagactgaggcatggaagggcgaagcatctgcccaagttcccacaataagaaatgatggaacgggccgggcatggtggttcttgtctgtcatcccagcattttgggaggccaaggcaggaggatcacttgagctaaggagtttgagaccagtctgggcaacatagcaagatctcgtctttattaaaaaaaaaaaaaaaaaaattagccaggcctggtggtggtgcacacctgtattctcagctacttggaggctgcggcaggagaatctcttgagtccaggagttcgaggttgccatgagccatgctggcaccactgcactgcatcctgggtgacagagcgagaccctatcaaaaaagaggggaaaaaaatggtggaacagggatttgagtccaggcattctggcttcagggtccctgatcctaaatactccacccccccacctctcacaggggaaacaggaagcactcctcacagagaccttatttatttatttatttatttatttatttttgattcctgctccgtcgcccaggctggagtgcggtggcacgatctcggctcactgcaacctccgcttcccaggttcaagtgattctcatgccttagcctctcgagtagccgagattacaggcacacgccaccatgctcggctaatatttatatttttagtaaagatgaggtttcaccatgttggccaggctggtcttgaactcctgacctcaagtggtctgcccacctcggcctcccaaagtgttggaattacagccatgagtcaccgtgccagtctcccttcactgagaccttagtcctgcaaagtccaatgcaccaaacacacgtgctatttaaatttatgtgtaaattaaattaaacatcttctgtcacactacctatatttcaaatactcggtagcctctggttgctagtgcctgcggtattggatggcacagacttggggattcgtccaagtagcagagctgggatctgaagctaacaaagttggttccagaatccaggatctaactaataactatcctggctgggcgtggtggctcacacctgtaatcccagcactttgggaggccaaggtgagcagatcacctgaggtcaggagttcaagaccagcctggccaacatggcaaaaccccgtctctactaaaaatgcaaagattagccggctgtggtcgtgggtacctgtagtcccagctacttgagaggctgaggcaggagaatcgcttgaacccgggaggcagaggttgccaagagctgcgatcgcgccactgcactccagtcagggtgacagagcgagactctgtctcgaaaaaaaaaaaaaaattaatgactccctcatgttgagtaactgtatgaaaatcatttgttactatggggttgaggtttttaaacgtgtctaaaactgcaccaggagctgtcagctgctgggagggagaacctggtgcgggcagaggaggactagccaagggtggccaggggggaggcaggaggaggaggaggcttggaggtggtggtgttgagtcctgtgatcccccagctgccggcgggaccctggtggcgctgagccctgccaggacaggccccgggtggagcagctctgcagtgttctggcaaaccgctccgggcccttggccaagtgccactggtatgagagccccgtgtcctacacgcaggtgtgtgtctctgacctctgccagtatggcacgggcaaccgcatgctgtgcaccatgctggaggcctacgtccaactctgcgccctgcgctgcgcgttgcctgcccgcgtggcgagccagcctgggatgcagttacgtgctccttccctttcaccgcccccagctccaacgatggcctccccacttggctagctaggatgcctccttcgccggtggatcggaagccctcatccccagggagaccccagccctgcctaggatgttaacccaagcttcaagccagaccagggctcctcttgggcccttcctaatcctacctctcacctcccagcactggaccctatattgtccgagttgctcactgtgtgctgcaagtttgaagtggcctgtgggtgtgacatgcataacaaaccacgtggttaaaagtttcatcggaacaatcgggaggctgcagtgagctgagatcatgccattgcacttggcctgggcaacagagcaagaccctgtctggaaaaaaaaaaaaaagaacagtggcagtttgggaatcgtcctgtggttcattcctgcccttccctcccctgcactcaccctgatttttttctccctctaattgagggagcaaaggtttcagggttgtggcctctgggcgatctttcccctcccccaggtgtggcgtgtccagccaacagctactatgactcctgtgggccacccttcccggccacctgtgctagcctcaactcctccgcgccctgcaccctccagtgcacagtgagctgcttctgcctcgagggctttgccctggaggcgggcatcttcggtgccccacgcttgctgcggctgccacctgcagggccgctatatccgcctgggtactgaggtgctgcctgcagccccctgtgatcagaggtgcgtgtaccatggacctggacgcccgctcgagtgccaccctcatgcctgcaggccctgtgagctgtgctgccagcacaggggtgtctggggttgctaccccatgcactacgggacactgtggctgtacggagacccccacctgcacactttcaatgggacccaccatcaggttcaagggcctggctgggagatattggctagaacatgccggccacaccacagcgcctatgccatctgggtggagatcaggcgccaggagccgtgggatgccatgtgggcccagcaggtggatgtggatgtggcaggatggcagctgtcactgctggcaggacagtttggagccgtccaggtacttgtcacccagctctggtcctgggcctccaggaactctagtgagtaatgagcgtgaagaacagcaacgccgggcgtgggagctcacgcctgtgatcccagcactttgggaggctgaggcaggaggatcgcttgaggccatgggttcaagactagcctggccaacatggcgaaaccctgtctctataaaaaatttaaaaatttagccacaagtggtggcacgtgcctatagtcccagctactcaggaggctgaggtgggaggatcatttgagcccaggaagtcgaggctgcagtgagctgagatcacgccactgcactctagcctgggcaacagagaccccatctcaaagaaaaacaaaaacaaaaacaaacacaaacaggctgaagaaatggtggtggcccaagggccttccctttggagaaagagctactgggacctttagaagtgggcagagggccccagccctgagcttcagaggatccacccgctttggcctcttctggctgcgtcccactccgtgggctttggagtcctctgggaaacgcccctgacccctagagcctggagcctgcatggccctccccttccagaccgtgctccaggaatgggaattccctgcctaaaaggctcagagctgcttccagggtccacgctggccttgtccccaggtccatcctcacaagagtggaccatgcggcccacatgacgcattctaggcagcattgcaggaagccagtgtggacccagctgggcagagcggcccaggctagatgtacggggatgcagtgcctcttgcagtgagggccagagctggggctgcacagagaagagacgggcccagggcagtctctccttggatgccagatcctgtccaggaaaagttggaaattctgattttgcacctgaccaccaggacgctagggaggtttatgcatcaaggcaggaggatagaccgtattccatgtaatagtgtggcagcttggtttgtaatcttaaacatgaagatgtgtaaggtgtgtgcctccatttctactcttgtctgggcccctcagggttgatgggtgttgggtccacctggggttcggtggatgctttagctggcaacgtggtaacacggtgaagcctgtggtgatgggcccaggggaccaggactgagtcccactgtgccatttgctagctgtggaactggacctagtggctttacatctctgtgcctcagtttcccatctgtaaaagggaagtgaatggtacctacctgtatgtgaggattaagaggtgtgaattgtctaggagaaggcatttagtaagggcataaaagcatttgatcaataaataacacaggtgaggtgtgatggctcatgcctttaatcccagcacattgggaggctgaggcaggaggatcacttgagcctaggcaacatagcaagaccctatctctatttaaaatttacatttaaaattaaaaaataatagtaaataaataaaacatgtaactgcaaagtcaagccaacgttgtaccactagtgctgcatccccac[138 bp omitted]tataatgaaacccgtctctactaaaaatacaaaaattagccaggagaggtggcatgcgcctataatcccagctactcgggaggctgagacaggagaattgcttgaacccaggaggcagagtttgcagtgagctgagatcgcagcaccattgcactccagcctgggcaataagagcgaaactctgtctcaaaaaaaaaaaaaaaaacaaacaaaactgaactcaggagccaggtgtggtggttcgtgcctgtaatcccagcactttaggaggccgaggcagacagattgcttgagcccaggagtttgagactagactgggcaacatagtgagaccccactctacaaaaataaaaaaaattaggccgggcgtggtgactaacacctgtaatcccaggactttgggaagccaaggtgggtggatcacctgaggtcaggagttggagaccagcctggccaacatggcgcaaccccgtctctactaaaaatacaaaaaattacctgggcgtggtggcaggcgcctgtaatcccagctacttgggaggctgaggcaggagaattgcttgaacctgggaggcggaggttgcagtgagccgagattgtgccactgcactccagcctgggcaacagagcaagactccgtctcaaaaaaaaaaaaaataaaaaaaaataaaaaaataaaaaattagctggacatggtggcgcatgcctgtagtcccagctactcaggaggctgaggctgaggtgggaggatcagctgagtccaggaggcagaggctgcaccatgcacttcagcctgggctacagagtgagatcttgtctcaaaaaaaaaaaaagaaaagaaaagaacaagaaacgaactcaggtcacattccttctgtctcaacgccctcccatggctccacctcactgagtgaaactgtggcctatgtgaccctacaaaactggtttctgtcacctctctgcccttgtcccctcccacctgcccctcactcactctgctccagccgcagtgacctcctagtgtcctcccatactccaggcaggctcccacctcagggcctttgcacaggctgttccctctgcctgaaacactcttcctggaggtcctcatataactgatcattctcatctttcaagtctcagcacaaatgttaccctctctgagaagccctccttgaccacacacatgaaaagaaccaccactcccaccctctctctactgtaaccctactccttttctttttttttttttgagacagagtcttctgccgcccaggctggagtgcagtggcgggatctcggctcactgcaggctctgccccccggggttcacaccattctccttcctcagcctcccgcgtagctgggactacaggcacccgccacctcgcctggctaattttttgtatttttagtagagatggggtttcaccg[140 bp omitted]gtcaatcatttctttgtttatgatctatcttccttttgacagaatatgtgttcttcgaaggcaggaacttaattttgttgaaaaatagacaaaaatccctgggagaaagacaataaacaaatacagaagtaaatttatggtatgtcagaaggtgacagctggttctggagaacaaaaaagcaggaaaggggtgaggggccagtaagggtgttgccctttaagacagggtaacaggccaggcacggtggctcatggctataatcccagaacttgggaaaccaaggcaggaggatcgcttgagcccaggagttcaagaccagcctgggcaacatagggagaccccgtctctacaaaaaatcatgtaaattagccgggcgtggtgatgtgtgcctgtaatcccagcacgttgggaggctgaggcaggaggatagcttgagcccaggagttcaagaccagcctgggcaacatagtgagaccccatctctacaaaaaatcaagtacattatccaggtgtgatggtgcgtctgtagtcccaacaagtcgagagactgaggcgagagaatcacttgagcccatgatgttgaagctgcagtgagccgagatcatgccattgcactgtagcttgagtgacagagcgagaccctgtctccaaaaaaaacaaaaagggaagcagtgaagtgtggagcagagatcggaaggagagaccgggagccatgtagatacaaggggagagtgtccaggcagaggagcagaggctggaagggtgcctggtgtgttggaggagtggtggggagacccggggagctggcgcagagtgggcagatgagtgaaggggtgtgtgagacaagatgaggacagaggggacagaggtttattttgtgggactgcccaggccacggtggcgagtttggattttctccaagtgtactagggaggtatggaaaggttttgagcaaaggagggataggatctaatgtgcgatttcaaagggctccttgggtgctatgtgcagagtggatctcagcagtggcaggagcaggggcccaggaggggcaggtgtctggacgtggttgcccgacgtagcctgggtgtctgtgttccaggtgaacggctcccaggctggcctgcccctgactctggctggggggcacactccaggccttcttcacgcccttggccatcacagtccaggtggcacccggcctctccatgacctttcacgaatcccatgccctctgagtggcagtgcctgagacctacaccaacaccctctgtggcctgggcggggacttcagcgtggatacccaggatgacttcagcggctctgatagcacatggctctctgatgccaacagcttaatgggggcccagcccctctgtgcccaccagacaaggcagccctataccaggccttctgtggcttgctgggcacccaagatgggccctacagggcctgcagtaaggacgtggatccccaggtgcatgtggagaactgcatccatgacctctgtgccacggggggctcaagagagactctgtgtgccatactggggagctacgcccaggaaagccagcagcgcagcgttcccatgcagccctggagacacctcttggcctgcagtaagtgggtattcccagggagggtctttctcagcctgacctccccagctggcccaataccacttccaggatgtcctcctaggtcaacaccacccaaagtgacccactgcatgcctttctggctaactgttcccgcgaagaacctacctgcttaaaactctgcaataacaataacagatgacactgagtgctattgcatcagtcaggatggtctgggttatgctgaagtaacgaactaacctgaacatgacccagcatgaccaaggttgtttcttcatcactatcttcgtcacctttgtcatcatcacagtcactatcatcattaccgtcaccatcaccaccaccaccagcgtcaccatcaccaccaccaccagcctcaccaccaccaccaccaccagcattaccatcatcaccaccaccaccatcaccacaagcattaccatcatcactaccaccaccatcattgttaccacaaccacaaccatcaccaccatcaccatcatcattgttaccacagccacagccatcatcaccactaccatcaccaccatcatcaccatcaccaccatcaccatcatcatcaccaccaccaccaccatcaacatcatcatcaccatcataaccatcaccaccagcatcaccatcaccaccagcatcagcatcaccatcactactataatcaccatcaccattatcactaccaccaccatcattgttaccacaaccacaactattgtcatcaccaccaccaccaccctcaccactatcatcactgtcaccatcaccgctatcattaccatcaccatcaacaccatcacatcaccaacaacatcaccagccctaccaccatcatcatcattactatcaccacgaccaccaccaccaccattatcaccaccatgatcacgccaccagcattatcaccaccgtgaccacgccgccaccgttaatcaccgccgtgaccacgccgccaccgttatcaccgccgtgaccacgccgccaccgttatcaccgccgtgaccacgccgccaccgttatcaccgccgtgaccacgccgccaccattatgctacatcctgatgatgcctccacctcccctcctttgcctttatgacttacccttggcccccacaaccctctctccgctcccttggtcctattctggttggaaatgctccagaatagtaatgcttgctcaattatttaactcctacctgttttcttccagagctggcctgtcctccccgcagcaattacgagctctgcggctcctcctgtcctagctcttgtgccgagcctgccctgcccgacagctgcctgacaccatgccaggatggctgccagtgtgacccaggctttgtgctcagtggcatggactgcgtgcccccaatccagtgcagctgctccatggggggcaggtaccaccacccggctggggaggccttctggactggggagcgctgtgagcaattctgccactgccaggcctccacccacgccgtgtgctgctccccgtcctcctgtgggccggggcagagatgtgagaccctcaggggcatctttgggtgccacccactctcccctggcatttatcaagcaaccatgcactcacacgtcgcctcctttgaccggaagagtgttgagtttccaggcacttgcgcttctgcttttaccaagtcctgtggctcctccagctcattgcgccttttcaaggtggaaattgggaaggagaaacaagtccagcagtcccattgtgttcatttcaaagatgtaggttcatgggacccaggtttgtctgcagagagagccccgacctgatgaggtaagcactcattggcatctagagactcttgaaccgattgaagctaaaagaaatacattggctcaaactaagtaaaaatcatgtgatagcctagtgaaagtgtagagattctgggtccacagaagttccctatataccactttggctgttttggttacagaaagcctcataaaaggtaactcaaaccagtcacagactgtgttttatgatttttagactaattacataactgaaaattccagagggagatcaggcatggtttgatcagggtgctaactcagtttttcagcatttctcttggtctgtgtttctctatagcattagctttgtcctcaggctggcttttcttgtgatggcaaaataactgccaattttccagtcattaaatgtgtattccccattgtccaaaacccgaatcttttcttaccccaagtactcaacaaaaattccaatgcttcactttgattaaaccccactgagccaatcagtgcagcccagaggttttcttaagcctatctaatcctactcaggagttgtaggtgggagagatcctgcccctaccccccatctctggcagctacttcttgcagggagagagggcaaaatgggaatccacccctgtgtccctatgtcccccgaaaccagtatttcttcttaacaatcttcaaagagtgtaaatgccctggtaaacctccactctgagacctgaaacttttgtctagaacccacaggggtggatgtgttttctaggcccgagggcccctgcctacaagagttccattgttggctattggaaaacacacagccacacccctcccactccacccccttccaggaagggaaccagctttcagaattagtcatgctgtcagcgtcccacacaacgagcccattgactccaaagggcagcacagcagatggactgctattatcccagtggtacagatggggaaactgaggcccgggaaggcagacttgcttgcctaatgtcgcataaggagaaagtggctgtgctaggattggaacccaggctgtcaggttctgagcccttccctttctgtctgtgggcctactgtgtgctcccaaaaagctgtggccaaattaaggaggtggcatgtctgattcatctgtggcggggcctgggatatatagtaactctcaacaatggtgttcattagtccgggcatggaggctcacgcctgtaattccagcactttgggaggccgaggcgagtggatcacctgaggtcaggagttcgagaccagcctggccaacatggagaaaccccatctctactaaaaatacaaaaaaattgcactttaggaggctgaggcgggcagatcacctgaggtagggagttcgagaccagcctggccaacatggagaaaccccgtctctactaaaaatacaaaattagccaggcgtggtagtgcatgcctgtaatcccagctactcgggaggccgaggcaggagaatcacctgaacccgggaggcggagattgcagtgagctgagataacgccattgcactccagcctgggcaacaagagcgaaattccgtctcaaaaaaaaaaaaaaaaaaaagaatggcgttcattcatccactcattaaaaacttcctgagcacctactatgtgccagaccctgggctcagtgctggggaaacagcagtgggtggaacggtcaagatctctccatcgtggtggagctgagattccagaggagagagagacaataggcctcaccagtatgaattatatagtttgtcaggaggccgtatgcgttcgtgtcagggaagaacatacagaacaggatggggaggggcggtggtggcttccagatggaaaagatggttttaaattgagaagccaaggaaagcctccttgagaaggtgatatttgagcagaaccccaggagagaggcactcatgtgcacatctcaggggtgagtgagtcccgcaggggctggatggggcctggtgcattggacgagccacagggaggctggtgtggctggagctgagcgaggggctggggagaagagacgatgaggtcagagaggtgacggggaccagatggtgggggacttatggggctagtgaggacttcgcttttgcctggagcgaggtgcgccgaggacagggctctgagccaggtggcccctgatgggactcaggtggtcccaggctccctttggctgcaggtgggaacagactgcggtggggcagggaccagagcagggagaccagggaggaggctctgggacgtccaagctggaggggacaaaggctgggccagggtaagggcagtgggaggggagaagtggatggttctggaaatattctctggggtcttatcccctcttcaaaccctgctgactgttcctggggccctcaagtttacgtgggcccctggttttgtttttgtttttgtttttgttttttgagatggagtcttgctctgttgcccaggctggagtgcagtggcgcgatctcagctcactgcaacctctgcctgccgggttcaagctattctcctgcctcagcctccagagtagccgggattacaggcatccaccactatgcctggctaatttttatatttttagtagagacagggtttcaccatgttggtccgactggtcttgaactcctgacctcatgatccgcctggctcagcctcccaaagtgctaggattacaggcgtgagccaccacgcccggccgcccctgttgtttttagtactccgtgcactccctgcaatcacacagggtgtgtgtgcagccagacgtggggtggaatcctgactgcccgttaattaactgggtgactttccgctaaacaactaagcccgggtgccgcagtttccctaagtggaagaataactctccgcaggcagttaagtcctgcagccacaagcccccggattattggttgagaatagagagacagtcagcaatcgtaggtaaatgactcaggcccgagcaggggtgtggcgctggcgcaggctgagtgcggcactgccttcttggataccagggtgcagggggaaggggatgtggagatgggtcccggctgccagcaggctgctgggtcagtgcctccccgcagctgagggtgccagccaggatcttagaactgcagactcatggtcctgcctctgcagccaggagggagcctgccagccccagcaccagcctcagagccttggggctcccaccgttagggggctggggctgggtggccaggaggagttaagtcacccacagccaggaaggggcagagctgggacccaaggggctgtgaacggtgaactcatccaggaggaaggagaaggaagacattgtgggagggccaacaagaacacaggcaaaggaaaaatatatagacagtaaaaggaaaaatatatatagataaaatattcaatatataaactatagtaatatacataaatatagagtttcttaagttcatttaaattctgtttccttaactgttagtttacctggttctaaatttacttttccttccactttttcggtgttgttttttatcttgtgatttattattttgtgttaactttaatattacatttttaagggctgggcgcaatggctcacgcttgtaatcctagcactttgggaggaccaggcgggcggatcacttgaggtcaggagttcgagactagcctggccaacatggtgaaaccccatctctactaaaaaatgacaaaaaattagccgggtgtggtggcgggcacctgtaatcccaagctactcagaggctgagacaggagaattacttgaacctgggaggcggaggttgcacagtgagccaagatctcaccactgcactgcagcctgggtgacagagcaagacattgtcttgaaaaaatatattgtttaattgatttttttccccaacttttgagattttcgactatagaaaagtcatgtaacccgtacaatccactcaaatacccttcacatagcttcctcaattcttagtattttgcctgattcgctttatctctttatatctatgtaattttcttctgagtttctgtgtctcacttttcctgtccctatttacttgtccaggcgttttcaaaagactcagtcttctctgttgttggttgaccaataaataaatatttagcctttttctggagggagatcacaaaacaggacagagctcttcctgaatccttcaggcggattcgccctctcttcctgttctgcggaggacagtcctggggcctttgctgtgtcaaccatgccccgaggcaccccagaagctgcatctgtcgagtctgtgctgtaatcatggccttgaaggtggaaggcaggtctgagatgggaggtgacaggagcaggtctgggccggagcaaccgcaagcgcccgtctccttctctccctccctccctccctccttccctccctccctccctccatcaaaccaggcagagctggggcctggggcaccccagggagacagacctgccacctcagcaatggcttccaggtgggaatgggggtcttttagtccagacttttccagagatgctggaaacacagcttgtcctgctgtttaaatgtttgcaattattaatttttgcaatgctttgtaaaaactaaaggtacaatagttgggttccaccctgggaccgccagtttgcaatccttctcttagggactgagtcaggctggggggggggggcgggctgcagggctcccacttgaaccagaagtccctgtcccagatgtctagctccaaatgtgttccctgccctttcctgcttccctgtagttcctgcccgcacccaggacccccagccatctgcccaagccctccccacccccaccacgccgcccccactccccacatgatggggaagctggccaagacattcattcctccacaccccctgcccccatcagcagctccaccctcagcacccccacctcagctcctcctgcaaggcctccgtggatggggggtggcggtggagaaagcctttcttttataattgttttaaacctacttttatttttatttttgtagagacaagatctctctatattgcccaggctggtcttgaactcctggactcaaaggatcctccagcctcggccccccagagtgctgggattacaggcgtgagccatggtgcccagcctggtaattaacagatacttcgtgaccacccactatgcaccaggccctgttctataattcagatgaaaatccctgagaggagctgacgtgctagcaggggaggcagatagcaccacaaaaaaaaaaaaaaaaaagcaaacagaagtcaaaaggtcatagagaggtcagggggtaggtgcgatggtggtcggggaaagccacttgaacctcatggctttgagctgtccagatgcgggagaaaagagagccaggcaagggaataggcattgcaagggctcttggccagaaacatgcctggagtgatccaggaacggcaaggaggcccaggtggccggagcagagtgagtgacaacaggggttagggggaaccctgaacctcccctgagtttccctagtctgtaagatgggggtctccaaccggtggccccagggccttatccaaccactggatatttttcattctgtctacaaagtgttaagaaaacgaagttaccaacatttaaaaatcagggccgggtgcagtggcttgcacctataatccctgcgcttcgggaagccaaggtgggaggatcacttgagacccagagttcaagaccaggttgggcaacatagcgagacccccgtctctaaaaaaattaaaaaattagccaggtgtggtgacgtgcatttgtagtcccagctacaggggaggctgaggtgggagaatcacttaagcccaggagttggaggctgcagtgagccatgattggaccactacactccagcttgggcaacagagcaagaactcaccttaaaaaaaaaaaatccggaaggccgggctcggtggctcatgcctgtaatcccagcattttgggaggctgaggcaggcggatcacttgaggtcaggagttggaaaccagcctggccagcacggtgaaaccccgtctgtactaaatatacaaaaattagccgggcgtggtggcacacacctgtaatcccacctactcgagaggctgaggcacgagaattgcttgaacctggaaggcagaggttgcagtgagctgagatcgtgccactgcacttcagcctgggcgacaagagcaaaattccatctcaaaaaaaaaacaaaacaaaacaggagatttcatcataaaaatctccatttctagcttctgtgggtgagtgatgacgtcagagcagcacagaggcaggtgtcagggagcctgtggactcttggccactgtgtcacctcacatggctcctggaagccaggcggacagtgatacgtccacagccacaccatccccatggtggtgggacagggttacctgccagtgcccactcttctcccacaggtgctgagaccacagcgctgttccacaaagccccaggaagccacattaccctgtccaccggcctctctagccccatcttgcccaggaagtgggaccttggcgtatcgctgtgaccacacctcccagccggtcagcctggccgctcaggctctacctgcaaaggcaaggccccacccaaccagcacccctctcatggctgggggtgcctccaggctgccctctctagggccaggagcctgcagaaacgctcccagccttgaataaagagcaacgaaattattgaaacaaaatcaataaaagtttgaatcagggatggtataacatgctctggctttgattctgtgctttaattcagcgttcctgaaaaacttatgatgtcagaaactatctgtaggtttggtttttttcattttgcaagaattcccaggatatggagaaatcacagccactcacagccttaacaggttctttgggcccaaatgattccaaaagcaaaacgagagaaactttttcaaatatgtttattatgtatattatatacaatatattaataaaacatattacctacatgcatttaaaacataactgaagtcagattggcccagaagactcactccaaatgagacctaatccccaatagggtgcaagtgactgcacaaactctactcctcacagcccttcctaagactcagtgtgctcatcacactagggtctcagagtccttctgaccataaacccaagccccagcgccagcccaacacacacttggacgcagcatgttcacgtccagcctaggaagaatttatggttgacctggattgggtaaaaaccgtaaacgtctgtacctcagaatgtaagatcatggtgtttaaaactacagaacattcagaggttgtcagaagtctctaattgctggtcccccaggttgaaaccagcccttaggttgaaattttgacctgcaaatttttttttaaatctgaaccaaattttttaaattaaacccctttaaggtagtacattttcaagatgcaaaattcaaaaaatataagagggcacgtgataatgagtgagtctcacttccaccccaccctccagcctcccagtttccctctccagaagccatgggtatggatgccaatctccaaaaatattttattcattacaagtatatacatatgcattattttaccgctcacaaatggtagcacactgcacggtttcccaataccttgttttttttccccttagcaagctgtctgggaaatacttctgtatctaaccacgggcaggggtgttcctccaagatttttagacaacagttctccagttcaccccgttccggtgaagggcagagcaccccccgcccttcccagccaccctgtacacgcccctactcgctctcggatgcctgcagttcccaggcttcccagcagagggagacaccattccactcccaagaccaccaaggggtcgtcccagacacaagcttcaagggtctagggaagagacgctatccgcccagacacaaagaccccccttagctatactgagttggcctccgggcctccccttcctgtttctatctcctcctggacctgttgcttagagccctaccccgaggtccccccgcccggcttccttatgggaactggccccgccttaagagtggtaggagggagccttacccttgtctaggacctgggcttgacaacttgccccagggaaccacatagagaaggggtgtagcgctgggcgaacattgccctccccgatccctcagcgatgacaagtggggggtccttctctctgcccccagcaggccagtttccggaagagccttgacccaaacccccttttcctgtcctgtgctccacactcccagcagctgcttctccctggccaggccctgcagccctcctccccgcccccacggtggtgttggggtcgcctggagtccagctggtgtccagggcagagctacccctttcctggccctacccctccccgtgaccccaatcctccgccaaccgctcaaaggatccttgttctccatccagcccccagacaaaagtccctctgtctaagaaggcggaattgaggggagggggcacccccaactgggaccatgggggagcctgcacagaccccatccggaaggaatgcctggaggaggaggagcaggagacaggggaggaaagggggagggaggcttgtacagtgctgggggccttatgtggactaggaggcagccgcccccaccagcacccactctgtagacccaggcgtctggctcccagcacccacggaaagagcctggctaggaaactgcagcctggtgcctggcagacagttctcattctccccagggcagggagcaggttatgaccaggactaaggtcccagagtccccaccctgacccctccctgctgttccagccgctccctcatatccacccctgccccatctcctgactttggtcacgctagcatcttctgctgatcctgaaattgtaccagcggcaagatgtggcctggaaggggactttaagttctccacaactgccagcaatccttccaccaggcaaaacacatcatctaaggaaaagaagtgaggtcggaacaccaacgcatcatctcactgcatggccctggaggctctgccgtttaaagaccccagaaccttccccattcaaggtcctctcctgggcacaggagattggagaaagctcctcccttaattccaggggccgagttccagcccatccaattctccgtctcacctgaggctgctgtggtcctggtgaccccagggagcaacctgccgcccatggctggggagggggtgaagctgtctctttaagagcaggaatggagcccctgggcctcagggcatctgacttgttttctacctgcccaggtttgcttagggcgtggcagcttcggataaacgcaggactccgcctggcagcccgatttctcccggaacctctgctcagcctggtgaaccacacaggtgagcagctggggccccttcctccaagccctccttgtctctgcccctaaattaggaagtatctacctgccccctgaccctgccccatagaagcttttatgttaaagcgcctaaaatcttgtgaaatgcttttctggagccaggagataaacggaagtcccttcccctaatgtccctttccccaccattctcctctcagggacttgttgaaccagctgaggtgagggcaggactgataagtgtggttggggtgtctgaaagactagtgtctgcatggattagggatatctgggttggggatagctgggtggaggagagggggtgcctgggtaggtaggggtatctaagtggaccaggggtgcgtagatggactggggacatctgggtggatgaggaatgctgggtggactcggggtgtccagacattgagggatctgggtggataaggagtgctgggtggactcggggtgtccagacattgagggatctggattctggagacctccaggaaaaaaggatggagctgctgggggaagctttaaatggggagttgcttgggagatttcaggagcacacagcgggcaggatctttctacccacccctgaacatgagaccattctcccatggtatggaggaatagaggggatagcagagggcaggtgggggaaacagtcctcaggccggccttgggacctcatggccaggaaggatgagagcaggtagacagagcatcagctgcagggctgccttcctctctaacctgctcaccaaccacatcagttcgggagcagcccacagcctcttcagacaacagcctgaatggggaacgtgagggcagacccagctcccggctccctgcagcctccggaagcatgggactggacgttgttttgcagaggctggggcgaggaggataccatctgtcagtcttggctggatgacatcatgggaagggggtatagtggggccttgcaggccagaggtggcttggaggagcccctggaaagaggcttaagaggtgagactcaacagccatggcgacagagcatagggctttaagatgaatttgcaggggttacaggattacaactgcaatgtgggctaataatagtgccccctgcattaagctgcagagattgagcgagtaagtgggaagctgagaaaatgcccccatggggtagacactcaataagcatctgctgttattaccaggactcgtatggtcatgggtgacagcttcagaccacaggcagtccacctacaacctgtgcccctatccaacatgccatcctgcccacccacccacgccagctcccccaacccccaacacttttggggatcctaaacacttcctgggcctcagtaatgctccccaaagcctcaggctttcttcccgcaaaaaaaggaaaagaaatggatgctccaactaaaattgtgagttcagcatgtggaattaactgggaagctgagaggattcccaggccctggggtgccaggcagagggaggagtctgtgccaacctgcaaggaccacccgcaccgttggttgcgggcaccaccctctctcagcatttttgctgttcgtgaaatgaggacatagtggacgacgtcggggattgctggggggttaagtgagtgagaacacggcaaggtcagtgtgcactccagggcaaggtggaggaagtgccagctctcgctatcaaaattataactaggccaggcgtggtggctcacacctgtaatcccagcactgagggaggccggggtgggtggatcacctgaggtcaggagttggagaccagcctggccaacacagtgaaaccctggctctaccaaaaatgcaaaaattagccgagactggtggcacacgcctgtagtctcagctactcaggaggctgaggcaggagaatcacttgaacccaggaggcagaggttgcagtgagctgagattatgccattgcactccagcctgggtgacagagtgaaactccgcctcaaaaaaaaaaaaaaaaaaaacaattatgataactatgcactcagcatttgggcagggacagggcagggacagggcaggggagggcatgctcggaggccagggcttggtgcagccttgcaggctggtgagagggcaggactgatgccaggtcaggaaggagagagaaacgagttccttatgctgagcaggtctacctgggaaagagaaagtgtttgctgtcaccaggaactctgctgggcctagggtagggtcaggggctgggctggggaccccggctaggcagagccagggctgggaccgggaagggcatgggtgtgggatgaggggcaggaggttcgggggaacagagatggagctagggctgcagccaggaggtagagtccccctctacccccagtcccagcctcacgtcaattcctccacacaccaccccacccccaagcagcttgaagaacctgctcagtcctcagcctgaagtctgcaatgtcctggcagggccgggcaggctctgagcggtctacggagacactcctgggaagcgggcctcctgccgcctggctcccaatgccccgcttccccaaacaccccaaggccctgacagtccctagttaggagcagctgctggggagccaggcctggcttaaatcctacttcctggctagagcacctagtttcacctctcagagcctcagtctccccatctgtccagtgaggacaacagcgggcagtggcgcccttgtttggttgcggggcgattcccagaaagcctgaagtccatgtccagtgagttattatggctcctcccgcctcaggcccgagtttcacccagtccccactccacggtgcagctgcggcttatctctcagcccagcgagatgccagccttcctgtcccgggtgagctgcgcaccctgcctggggagcaggggaggagggttggggagccacaggcacagggccagcctcccggtggctctgctaaggccagacctcccgccacccctctaggccagcgctctgacatgcagaaggtgaccctgggcctgcttgtgttcctggcaggtgagtacccatcccccgtctgccttttcctctggatcccctggatgcggggatccaacctctgtctctctcctgtgcttttctacctccccgggaaggtggtaaatgttagaacagcatctccctgagggtaagaaaagtcagactagtgatagccggggatacacgagaagagctggctcacacagctggaaagtcaccgtcttccccattctctcgatctcttctttttttttggctttttttgtttttgtttttgtttttgtttttgtttttgaaagggagtctctgttgctcaggctggagtgcaatggcgcaatcacagttcactacagccttgaactcctggggtcaagcgatcctactctcttagcctcctacacagctagaatgccaggcacacgccaccatgcccagtgcatttttgattttttgcagagacgaggtctcactgtgttgcccaagctggtctcaaactcctggctgagtttgatcctcccacctcagccttccaaagtgctgggattacaggcatgagccacactgcactggccttgattgactattaaacagaaataacggaagctagagaagatgatgaaatgacaccttcaaagcactgaaagaagataactgccctgccagttctctaaaaacttcaagtagaaggctcagctcagtgcgactgcatctttaacttccaaacacttttcccttttttcttttcttttttttttttcggagacagagtctcgctctgttgcccaggctggagtgcagtggcatgatctcggctcactgcaacctccacctcccaggttcaagcgactctcctgcctcagcctcccaagtagctggcattacaggcgtgtgctgccatgcctggctaacttttgtatttttagaagagacaaggtttcaccatattggccaggctggtctcgaactcctgacctcaagtgatcctcctgcctcggccttccaaagttttgggattacaggcctaagccactgtgcccagcccgctttttactttttcactgcagccttgacctcccaggctcaagagatccttccacgtcagcctcccaaagctctgggattacaggcacactttttgtccattacatagggcaagaccagtattccctgcagggtagtgatctaaaattacattttcaataaagtctatttaagtgtataatagtgagtcattttcaatgatgtgcaaacaccagaccaggtgggtgtggacatggtggaagcgggaggatgggctttgagcatgattggacttggggaaacaggaatctgggaactgaaaccatctgtcgtcttgaccagaaaagtcccccgctgctgcaggaggcatggattaaccacgtgtctggaaacatgagaccaaatagtggctaaaaacctcctagattagaacccatttcaggtggcagaatgctggcgtgactcggaggtgtggggctgagtgggcgagtccacatttcctcgttgggatatgaggggatgaggtggctgctcagtgacaggacccctgtcccgcaggagaccctttcccaaggcccctgaaactccccaggccctgcccaaaggcttggctgaggccggcatcaccatctcccctccttcccctcttctcccactaggctttcctgtcctggacgccaatgacctagaaggtgagtcagactggactctcacccgtcacacccccaaattctcccctgggtggggaaggcctgcatcctggctgtaatcctggattcatgatcttttttctttccttgcagataaaaacagtcctttctactatggtgagagcccgtgccccctttcccctccccacaaccccacatactgcttggtgccaagggttcccatacagggttggggcctgacgtgagcatcacaggacaaagatacgaagggactaggatggggttactgaatatgccacacagtggattaaaggaactagaggcagcaacctggcctttgggaaggttctattccagcaagatagacacacgcaggaggtgaggacagtttgcaagaagccattggttggttcagatcaactgctgggagaagtgttgacttgagaaaacttcctggaggtggtgagctattggatcaaaaccctcatctggcctccaggttccaatgacctgctccctactccccgctctgccctcacctctccacgctcctcattccttctgctccaagcctctcagacacagcagacatactgccagcctcagacctctgcacctgctggttcctctgcctggaacacttccttccacagaaccacatggctccctcccttccctctgctcaaatgcagccccctgagaggccttccctgacaactccctctaaaagagctgccatctgactttttttttgttttagagacagcgtctcacactgttgcccaagctggagtgctgtggtgtaatcatagctcactgcagcctcaaactcctggtctcaagcgatcctcctgcctcagcctcctgaatagctgggactgcaggcatacaccaccatgcctggctaatttttgtatactttgtagagatgggttctcactatgttgctcaagctggtctagaactcctgaactcctgaagtcccaaagcactgggattatattaggttggttcaaaagtaattgtggtttttgcaactgcttttaatggcaaaaatgcaattttttttttttgaggcagaattttgctctttcacccagagtgtgactggctggagtgcaatggtgcaatcttggctcactgcaacctctgcctcccgggttcaaatgattctccagcctcagcctgctgagtagctgggattacaggcgcctaccaccatgcctggctaatttttgtatttttagtaaagacggggtttcaccatgttggccaggctggtctggaactcctgacctcaggtgatccgcccaccttggcctcccaaagtgctgggatatcaggcgtgagccaccatgtctagccaaaaacgcaatcacttttgctccaacctaataggtgtcagccactatgcccagcccgccctctgactttccatctcccaccccacttatttttcttcaaaccacttatctctgcctgaccctgcacgacagatcgtgtttgctggtgtgtgaaccagaatgtgagcacctgggattttgtctgttttcttatggcggtgtccccagcaccctgtgcatcctaggtgctccatatatatttgtcaagagaatggggggacagatggagaggacacaggctggcactgaggtcccctccactttcctcctagactggcacagcctccaggttggcgggctcatctgcgctggggttctgtgcgccatgggcatcatcatcgtcatgagtgagtggaggagctcgggggagcaggcgggccggggctggggctcccctcccctgaccactcagctctccccaacaggtgcaaaatgcaaatgcaagtttggccagaagtccgggtaagatactgttccggcatgcccgcctcaggctgactggacgcttttcagggtgaaagggctaactctcccagcaggagaggcctcggggctctgccctttagagttcctgccgctaagatttccaggtttattgtttctagctggtaatccccagggggccccaaatcctgaaatgctttggcccctgggattgcacaaccccccaaatggaaaggcagccaggaagacatgtctgggcaggctaagaaccctctatccggagggagagggcaaatgggggcggacaccaatctcaccacttttgtctccttagtcaccatccaggggagactccacctctcatcaccccaggtaagatggggcagcatggggctcaggggaacacggaagtggtgtgtgtgtgtgtgtgtatgtgtgtgtttgcacactggaaagaaaagaactcaatccaccctcacaaacggaccccatcacttcccgcaggctcagcccaaagctgatgaggacagaccagctgaaattgggtggaggaccgttctctgtccccaggtcctgtctctgcacagaaacttgaactccaggatggaattcttcctcctctgctgggactcctttgcatggcagggcctcatctcacctctcgcaagagggtctctttgttcaattttttttaatctaaaatgattgtgcctctgcccaagcagcctggagacttcctatgtgtgcattggggtggggcttggggcaccatgagaaggttggcgtgccctggaggctgacacagaggctggcactgagcctgcttgttgggaaaagcccacaggcctgttcccttgtggcttgggacatggcacaggcccgccctctgcctcctcagccatgggaacctcatatgcaatttgggatttactagtagccaaaaggaatgaaagagagctctaaccagatggaacactggaacattccagtggaccctggaccattccaggaaaactgggacataggatcgtcccgctatgatggaagtgttcagacagtttataatagtaagcccctgtgaccctctcacttaccccgagacctcactttattacaagatctttccaaatacccaaatgtccctgcaagcccgttaaataattccctatgctacccttaataacatacaatgaccacatagtgtgagaacttccaacaagcctcaaagtcccttgagactccccaatacctaataaggcatgcgaaatgttctcatgaactaccccacaacacgcctaaaactcaaaacacccaaaaatatctcctccaatgtcctgaaacatgaacccaaaaagagacccacaataaactcgtgacttgtcccctcatcatgccgttttatccctcaaacatcccctgagtccctccataaccacgaacccacactcagagaccatgaactgcggaaacgcctccctgggacctgggccgctccgagcactgctccagggacaccatccccgccctgtgccgttcacaggacatcctctcccaaggatccacaacactgggcggggagggtgcacagcgcatttattgagctcggactcgtcttgtccttgcctccgtcgcccatctagaagggcaccaggctccccgcgacacctcccgctgtccctccctgtgccccggcgcacgcgcaagaggcgcaaaaggcacagcttgctgggcggccgcacgcatgcgcacaagcagcagaggggaacccgcccagtgctgagttgtcttcgaggttggcgctcctccaggaaagcgattggctgcgtggagtttagaatgggaaaggaatgccatcaacccctcggtgctttcagagggaccagcggggtaggagcgggttgagaggggggctccgggacctcatggagctctgcacgtgacctccacctcgactccatgcagtgcaccagcctgcaccccccaggttgcctttgatggggaatctgccccagccgagatgtccagatgttgctttagacctgaagggcagctcgggaggtccagtaggctgggaccctctatgtccccccatgggtgcagatcctttaagaagtgggcttaaggcctagacgtgtggctgatgaacgtggcccacggtcagcagctcacaggcgggccatcaccccaagtagggccaggagccagccaaggggccgtccaggggccccagccatgcccagagtcccgttggtggtctcaggcactgaggtcgatctcgtgatgctggtagatctgtgtggggcccttaaagcaagcagcaaagaggaagcgtctgccggccatagtgatgtgggcaaaggcacggggggccaccagggccggaggccccagctcctgcagtggctccaggagccccttgtcaggctcaaggcggaggacctggctgaaggcgaagtcgctgcctaggatggccagctggtccctggcgatgagcagtggctggaagacgtgggcaccgcgcgagggaagttgctgcagcagacgaaacatggagccgtcccagcgcatgacctgtgggggtgtggccagtgagggcctggggtcccgggggtctctgggggccgtggaacagcttggaagcagaagcctgtcggtcccaaaactcccatagctttcttatcttcataaaagtcaccacccacctgttcggccacacacatgcagttgttctgagcccttcccttgccctcacgccccacacagaagcactcagccatggactctgtcagtttcaccttctacagttgtacatttctcccaccacctctggctgaactccatcccctcctgactggaccatcctggcagcctcttccctggcctctaggctcctctccctgctcccccagtctgttccccacccagagaccttgtgaacacctgagtcagatcagggcccttccagactcagaaccctcccctgcctgcacctcactccagaaacagtgggcagtgcttaaccctagcatcagccttgggggctcagtgtcagggtggggacaggtgtggctgtggtgaagtctggaatgcatccgagtcacagagccagcatttgggggtagaatcaggatgttggggccagcatcagtgtcggggactggggagtggttcggagtcagccagccttgagggggtcagagtcttggcatcagtgtggggtggggtcctggttcaaaggtcggcatgtgagggtaggtcagagtttagaggcttagtgtgcaagattgggtcagtgctgaaaagccagccccccgcccccaggcccagcctcaccatggagtccccaatgtagcgtgtgaggcacaggaacacgtccccaccagcctggaagtggcgtgtggcatagacatcctcggcctcggggatgtctgtgcgtctctcgaagcggccaccggtccagtggaagagcacgggccgctgggaagccgaggccagcagcaggtggggccggccgtccagctccagggcctcagcgtccgtgtcccggtgccaggcgtgcaggctctggtgcgggtaaaagccgggcccgtcgcggcacagcagcgtggtgctgcccgccttggaggcatcggccaccacgaagcagggttgcccttccagccacaggagctcggcgtcattgggccgcagcagccgccgcggggccagggtctgcgttggggccaggcgcaggccgggactgggccgggcccacagctgtgagcccccccacaggcgggcagccagcacgaagaggctcgggcccagcaccagtggcttgcaggacaccacggaggccgctgtggggaggtggggaggcaggtcaggccagccaggcaggctgctggacaggcagaaggacggggagggggctcaccgggcagctcttcctcgggccggaagcgctgcaggctgtagtcccaggagagaatcaggcagcggccggcgaagggctgtgccagcacaatgtgaggctccccttggtaggagaagggctctacgctcagtgccgactcccccaccgtctggaaccaggacagctctgtgggtggagaagagagtcaggcaggccccaggacccccagggtcctcattgctgagcctcagtttgcctacatctctgaaatggaggccattcatggtacccccctcatagggacatataactggaatcttgatctgtagatgtttgtttggtttgggtcgaggggtattttgttttgttttgagacagggtcccactgtgtctcccaggctgaagtgcagtggcacaatcatagctcaatgcagcctccaccttctaggctcaagcaatcctccttcctcagcctcttaagctgagactacaggtgtgtgctaccatggctggctatttttttattttttgcagagatggagtcttgctatgttgcccaggttggtctggaattcctaggctcaagagatcctcctgccttgacctcccaaagtgctgggattacagacatgagccacctccacctcctgggttcaaacaattctacttcctcagcctcccgagtagctggaattacaggcgcccgctaccacgcccagctaatttttgtatttttagtagagatggggtttcaccatgttggccaggcttgtctcgaactcctgacctcataatctgcccgcctcggcctcccaaagtgctgggattacaagcgtgaggcaccgtgcccggcccataaatcttattttctaagctgtgtggcatcaccaaataatcccttagaaacagcatctggattaattcatttaacttcacaacatccctgtgaggtacattctgtgatgatttccccttcgcagatgagaaaacaaaggctaactggcacaggcagtctgttatccaacaaaatccatccttcccaccttccaggagagaggattggagctggtcaccaggccacccagctagaggctgcattatcccgggacccccattcaccgccctcgctgaaagttagatgtggctgttttgagactgagtaaccagtggaacaagggcagatgtgatgagtgtaatgagccaccacacctggaaacagcttgtcccaacttggtctcctttcccaccacgtgggtgtgccacaacctggtttcaagcctgaaagcaaggacaatgcccagggactgccccacgtacctggacagctcactccagatccttctatccttaattcatggtattttgagagtttgtgacagcggcttggctttcattgtcactggggcaccaaggctgctccgcttgttagtaggggagctgggcagttgactccaggctgtaatatttcactctgcgtgccaggccctgtttccaggtgccagcgttgaagcaatgagccaaactacatataatgcccacctaaagggcgaatcttttttaaatggctatcaaatcacctcttgctcaaaactctcagccgagagtggtggctcacgcctgtaatccccacattttgggaagccaaggcagatggatcagtagagcccaggagttcgagagcagcctggacaacatggtgaaaaccccatctctacaaaaaatacaaaaaattagcaggcatggtggtggtgcacctgtagccccagctaccagggaggctggggcaggaggatcacctgagcctggggaggtcaaggcctcagtgagccgtgattgtaccactgaactccagcctgggcgacagagtgagatcctgtttcaaataaacaaacaaacatacaaaaaactttctattcttgccatggcccagaataaagtctcctctcctctctgtggcttccaaaatccatacctgtccctccactcactacccctgagccacacctgccttcgtttgatcttcaaacagggcacactgtatgctgcctcagggccaccggccaggctgttccctctctctgaagagcccttccctctgttcctcacttagccacatcgagacctaacatccccacttgagagaagccttctctgactcccataggaaccctcattctctcatcactccttgtagttatcacaacgtatagcacacattgatctgtgccgtgtttgttaaatgtccatctccccaaactcccaggactgtaagtcccgtaaggccacggctcaggtcgcaaccacagtgaccatcacctctcacagggctgggcactgagtggacttcagtgaacatttgttggataacttgaatgaagagggactccctaagttaaatccccttcttctatgtgtcccacagaccaaaaacatgtctttcttacacttagaataataataattatatgctgataataattatgtatgcatatataattatatatatattatatatacatgttgtgggggaaaggaagagagatcagactgttactgtgtctatgcagaaaaaggaagacataagaaactccattttgatttgtactaagaaaaattcttctgctttgagatgctgttaatttatgaacttagccccaaccctgtgctcacagaaacatgtgctatattgactcatggtttaatgaatttagggctatgcaggacgtgctttgttaaaatgtgtttgcaggcagtatgcttggtaaaagtcattgccattctccattctcgattagccggggacacaatgcactgtggaaggccgcagggacctctgcccaagaaagcctgggtattgtccaaggtttccctgcactgagacagcctaagatatggcctcgtgggaagggaaagaccttactgtcccccagcccgacacctgtaaaggatctgtgctgaggagtattggtgaaagaggaaggtctctttgcagttgagattagaggaaggcatctgtctcctgctcgtccctgggaacggaatgtctcggtgtaaaacccgatcgtacattctgtttactgagatagaaaaccgccttatggctggaggtgagacatgctggcggcaatactgctcagctactctttactgcactgagatgtttgtgtaaagttaaacataaatctggcctacgtgcacatccaggcacagtacctttccttaaacttatttatgacacagagtcctttgctcacatgttttcctgctgaccctctccccaccattaccctatagtcctgccacatccccctcgctgagatagtacagatagtgatcaataaatactgagagaactcagggaccagtgccggcgcgggtcctcacttgctgagtgccagtcccctgggcccacttttcttcctctatactttgtctgtgtgtcttatttcttttctcagtctctcttctccaccttgcgagaaatacccacaggtgtggaggggcaggtccccttcatattgttatagataataataattattgctgttgttattgtattcatagcatctgtggccgggtgtggtggcacatgcttgtaatcccagcactttgggaggctgaggtaggaagatcacttgaagccagaagttcaagaccagcctaggcaacgtagcatctcccagaccctatctctacaaaaaagttttttaaaaaaattagccaggcacagtaacatatgcctgtagtcccagctatttgtcaggcttaggcaggaggatctcttgagcacaggagtttgaggctgcagtgagctatgatggcgccattgcactccagcctgggcaagagaatgagaccccaactcttagaaaagaagagcatctgtgtaaagacccttcaggcttaaactccttcaggaagcccttcctgtccccccagctctgtgtggccctggccctgactctgggctccctcagctcccacagctttccccatccctgccctgacccctctggctgggcctccccatcctgcccagatcgtcctgggctgtcctgtctgggcctgcattcctctggactttgaactctttgagggcgagacccagggctggcctcatcattctgtgctctctgcactgcccagtatcctaaaaggcaacaaaatctatttatagaaaaggcgagtcaatgtaaaggaggtgacattgcacctgcagttcttagcgcaatacttggcacttaacgaagaatttttaaattggttgcttttatgttaacaagggtgaacgtttataaggacctcctgtcccaggcccggcgccaaatgccgaacacgtgaagatgtatcattgaattcccatggcactcctatatcactgtttattacccccactttacagatgagaaaactggggctcaggaaggcagtgctgcttgctcagggtcttcccactccgggaaatggcagggcagggagtgagacgagcctcttggccctggcagcctttcccccagatctcccgcctcccaccccatcgggaaagccccccacctatggctctgcacttgaaagtcttggggtcgaggtggtggagctgcatgtggctcagggaggcggggcccgcacaggcgccggtccccacgctggcattcacggtgggcatccactgcaggagccagaggacgcggcagtcacactggaacgggttcccgcggaggtccctggggcaagaggccagggaggggctgcgacccggcttccacgccctgggggccatgctcctgcccccacctcaggcaagtgtccccagagatggggccccatagtggtaagaaaaatacgtaagaaccactgcagccaaatgcatgcacgccaaccagaagtgggcacggatgccccccgccgacacaaacattccccaaccccccacattcccagcccccatgagcctcacacatgagtaagggtgtccaggcctcggaacaggaatctggggagggtctccagatggttattggccaggcttctggtggaggaagagaaggcaccgtcagcagccacaaggataccctgtgttccctggggggtggagcatgggtgcctctcatggagggctggggcggtggaggcacgcacaggtgtgtaagcgagcgaagtcctctgagggcattcttagagatggagccaatctcattgtcctcgatgaagctgtggagggaagctggggtcagggggaggcccgctgagcttcagggaacgcaccccatgaaagacataggcccactggaaggtgctgaattctcttccaataccacggacaatcccagggaaagcctctcaaaaacctctcctcccaaagtcccagccatcaattctaggagccatgaaactggccccatagtcattgccagtttcactgtgaacattgtcctgctgccaccaccacaatcaccatcaccagtgctgacacccaaatcaccaatacctccagcatcattggtaatgaccaacaccaatgccagcatccccaacacccatgtctttatcactgtcatcaaccccaggaccaataactgccattatccccaacaccataccctgccaccaccatcaccaccaccagtgctagcacccacaccaccacattacctccagcatcatctgtaatgaccaacccaatgccagcatccccaacacccatgtctgttaccatcatcaaccccaagaccaataactgctgttatccccaacattataccttgccactatcatcaccaacactagcatcattgtcaccaataacatcaccacccactcccatcaacaccatcaccaatatcatcattaccaaactccacaccaacaacactaataatcatcaccaacaacacaatcttcatgatcaacaccaaaaagattgccacccgcatctccaatgcagcactatcacacacatcagcatgagcgccaccaacactgccaacactcacatctccattatgcccaagatgcacatattcacccaccaccagtactaccactgccggagtttccataaataccaacaccttcaccatcatcaccaacccagtaccaacaacattgccattcataccaaccccaacatcctacccacagccatcaccaacatcaacaccaatactgtaatgacccacccccacaacattgataattatcacagacacgagccccaagaacttcatcagtgatttcatccatagcatcatcaccactggggctaccatttttaccaacatcatccccactccatcatcatcaataatgccaccaatcccatgtcagcagcagcaacagggtcatcaccactgccattatcatcaacgccatgacccacaccaatgccagcattgtcatgctgtgactgccaccgctgccaccatcaccaccactacccaatcgtcagcaccaccctcaacaccaccacagtatcaccaccactacctaattcagagttgtttcctggtcatttgaaacgtttcttgtctctgacttctgtacacccttcctgggtttctatgagtcagggagagccagaatcaggctctggttatccgggccctttgtagatcttgaagcagagaagtgaggtgataatcaacactgataaacatcattgacaccagccctgagaacttcatcagtatcacccaaagcatcatcaccattgggttcgccatttttatcaacaccatcccaccatgatgtccaaacacctgctcctcagggccacagctcccatctccccctactctgggagccacagaagggtccctccttgcccagacccacctgcctccatcccctggcctcactcacaggtactgcaggtgggacaggcccgcaaatgcatcgtcctcaatcacggagaaggagttggaggtgaagaggctggcaagggggcaagaaagaaatttttccagaattgcagcccccatctgacattttaaccctggcctccaccctcagcctaggtgggcatgggcacgcaggtgtgagtatgtgcatggacacaaatgcttttgtacagacgtgtgcatacacccccacacacgtgcatcaatgcccacctgacatctgtgtgagcatacactcccacacatgtgcataaacgcacactcccttgagctggttgtcggcccagccaggccccactcacagcaggtgcagagacggaattctcaggaagctgccggccttcagctgggtgactcccgtcctgacgagtgagctggggatgtgggcagtggtaggtgagagggacaccacagcaatactccagttgcaaaccagaaccttctgccatccgggagaccccagcgtgccaccctgaccctggatgtgtctcccctgcatgccagaggaggcaggcatttgccctcctggcttgacaaggaccctgacagcactcaaccctcctcctgggccccaaatgctgtccctgccctctggggtttccttctgctccttcccagatgccagcacccctcttcaaggcatcccgacaggctttgctgcccatctcctgagatcctgatgggcccctgtttccctggagacccggcaccacatcccaacctctggggtcccaggacttccgtccccaccttcgggcatgcagaaggctggacactcacagtgacagcagggtcggagagaagctgacgggcaggtccggggagccctcacacagggcgctgtctttagagcaggagcagcgcaggggacactttccctttgggggtctccaggccaccaccacccccgccccagccagcagcagcagcagaatgcctgcccctcccatgcccccacccccactctgaggcacccgcttctcccggcccacccagctcagcccaggccactacgtctcctcctccaccaggccgccctccatccgcctgctggcacgctcggccctggcttctctctcctcttctccgtctttctttcagtcggccttcctccctgttcgtatgtctttggtgtctaattttctgtttctctttctccctgtctttctgtctctgtatttttgactctgtgtgttagtctgtttctatttctgtctttgtctctctttctgcctgtttctttttttctgtgttgctgtcagtctttcaggctttaggtagctgtctatctgttggtctctatgtgtgtgagtgtatgtgagtgtgtgtgtgtcctgctgcctggtgtcttgatttcttgtctcctgccccccccacccccccttccagctccctgcctgtagtttctttgcctcctcccacctcccttctccccgaaggtttgggaaaggggttcgctggacacccggcacacccggcagagtaggatgggaaggaggagggggtcagaggccatgagaaggtcggccttgggggaagggactggacagccccacaggagggggaggggccaccaagggctggagccgccccaccactcccgccagccccctccccagattccccactcaaccctattgggggagcaggaggacgatgtcaccagggtggggaccagatggctctgcattctggagcagggtgggaggagaggccctgggggggctggggacatcccgtcctggccactctctgccagccccctcccctggctacaggagggtgtgttgggcgctgtcagtggggccagatcacgtccagctgctccctctggtggtcatactcggcaggacctctgcccggccccaagcccttagcctccctcccctaccctgaaattaaccctctagtggccaacacccactgggggacagcaccaacccgaggacatgatgatgatgaagatgatgatgatggtgaagatgatgatgatgatgccaccccttcttcagcgtctactctgagcctggccttgtcctaaaagctcatctattaactcattctgatcttgccaaagccctctgaagttagtgctgtcatcatcaccactttacagctggaggaagtggagacagaggtcagggaacctgaactctaggttacccagctgagggcacagccgggattcaaacccaggcatccggctccaggttattttgcattctttctttggagatcagagttcatggatagatggataattggttgttttaatctggactaaattttagtcatttggatagattctgtccactaaataagaaacataagtaaatgacacttgttagctaagatgaaatagtagtaatgtttatactcactcagccttcacagccaccctgtgagatgggcagtactgctatccctgctttacagatggggaaactgaggcacagggaagttatgtgattagtttcctggctctagtcagctctaaacctaacccctaggctgtaccacctcatcgcctggggacgagactcatcctgtgattgaggaatgcatgcagcctctcttgacactgacgcccacgcccagaagcctcgttggaggataagggggcttaacagcttggaggtcatgcagatctgggttccaggcccagtcctgtgtggcctcagttttcccatctgtcaaacggggacaatcgtggcacccgcttcccagttgtggagaggactcaggtgatggaggcaactcatccttttggggttcagcacaaggtgggcatcccacagtggtcggcaagcttgggggtgggctccggatccagctcctagaggagcagaccccagcagcttgtggtttgagccatgcccgtcagctctcagtttccttcactgactattgggtatgataaacagggtccctgaaagtgaagttggagagctgagtgccaggggcacagagggatctgaacccactctcatagggtgcccagcccagcagtccagttcacaaggaggaggatgacaaggacaataataataggccaggcacggtggctcatttctgtaatcccacattttggcaggctgaagtgggaggatcgcttggggccaggagttcaagacaagcctgggcaacatagagaaaccccgactgtacaaaaaattaaaaaattagccaggcatggtgtcgcacgcccatagtcccagctactcaggaagctgaggtgggagaatcacttgagcccatgaggttgaggctacagtgagctatgattgtgccattgcacttcagcctgggtgacagagcaagacccggtctcaaacaaacaaacaaaaaatgaagttaatcataagacaatgtcaagttcagagacctctgagccctgtccaggattatacacgtgatcttagtgatttttccattttggagcatgtgaaaatgaggcacagagctgctcaagttcacacaaccaggagtgcagtgcctgggccattccaggtttccctgtcaccaggacctgtaaacctggcctgcccatggggacgccaggtgtgttgtccccgacaagagctcaggggaaggaaagtgtggggttaaatacatatctgtggttttggaatgtgtgaacatgcaagtgtgtcagcctgcgcatctgtcaccgtggccaaccatgtgcctgtttgctcaagcatagggtgtgaaccagtgtgtgtgtttctgcttttgtgggtatgtgtgagagcggcgggttgtccttgatggtgtttctgcttgtgtatctgtgcccatggaaatctgtctgtgtgtacacaagcttgttggccttcctatctttgggaccatgtaggagtgctggctgcatgtctgtacctttggggtttttttgttttgtttttgtttttgagacagagtctcgctctgttgcccaggctagagtgcagtggcatgatctcagctcactgcaagctctgcctcccgggctcaagtgactctcctgcctcagcctccggagtagccgtgattacaggcgcacgccaccacacccagctaatttttgtatatttttttagtagagacgagctctcgtcgggttggccaggctggtgttgaactcctggcctcaagtgatcctcccgccttggcctcccaaagtgctgggagtacaggtgtgagccaccgtacctggccatgtttggccatgcatcttagaatgcatttatgtgcggtgtgcacatacttgtgtgtttctgtatggccatttgtgggtgggtcttcacataaacatgcatttttgtggccagtttgtgagtgtagatggtgatgtggctatgtctttgactgtatctctgtgtggccatccatctacatgagcgtgcgtgggtctgtgtagacataaatgtgcttgttctggtattttgtgactggcataaaaggtgttggctgtgtgtccgggtctttgggtttctctatcagtgtgtcattctgtgtgtgtctgcttctatggatgtacatacatacatggttttgtctggttttgtacctgtatatctgggtctttgggattgtgtgtgggtgtgtgtgtgtggtgcatttctggggatctcaccacagcagatagcgcacatgcgcgcgcacacacacacacacacacacacctccctcccgtcctctaaaacagccctgttaaggacctcacggagcactgggatcgggggtcagtgggctcctgggcagtcaggctgggtgaccttcggccctggctggacccagttcccagggggcagccgcctcagcccaaaagctcttggaggcgtgtgtgtttgtgtgtgtgtgtgttcacaaccctgtcctccacaatcctcctagcctctccagcctgcctgctggctgcctgctgctgctctctctgaactgagagagttaaccaagcgggccagggcagtctgggctgggggccgccccctggcccccctccagccccagctccagtttcagctgctggttggggagggcatgggtggggtggggctgggaggggaggctgctgggggcggcgcgtccagctctgggccagggggtccaaagtgctcagcccccggggcacagcaggacgtttgggggccttctttcagcaggggacagcccgattggggtgagcgtcccccactccttccctccaggcctcacccctggtctggctgggccgcctattttgggagcaggagtggccagcccgaggcttcccaggcaggccaacccaagagggagggagtgtggttgaggcagtgggttctgcagggtgggatgtgggtgactcctccctgccctgctggtgcgtgtgcaccctggcagggtgtggagttgggacacacacgtgtgtagggctggttgcgtcactgcgtgggggcaccggaggcccagaggaggagtattggatgcctgacggtgtttacaccccacgtcctgctccaaccagcagtttggggagaggttgttgttcatgtccattccggccccactgtgtgtgtgtgtgtgtgtgtgtgtgtgtgtgtgtgtgtgtatccctgccccagcatgtgttttctatctctaaggcccactgggctgggcctcatgtcacttgcctgacatccgattgtgaaagatgtcacccagaggcgggcagaggggctgtcttttccttttctcgttgctgcccagggaggagacggggtgacctttcccacaggggcagcctgtggcgatgtggcagctgggcctcaccccggcagggctgtgcgtgaccccctgagtgggggaaggcaggctgttgccatggtggcctgagcgagcagaattcctccagggtgaagtgggagatatttatacccggggtcaggccgcgagcgggcgggcggagagggcagggagctgggatttcgcggggcacagtgaggccgggcatgtaggcaggtgggacttgggcgtgccctgctgtctcctgctctgtgtttgtgtgaggcagcgcctcctctgccctgccagggtaggtctgggaatcgggggcctgctgcgggaggtggaggcccaagggaggccccccggggactgtgtgtctcacccccgtccctgctacgttgtgttgttgtgtgatcccatcgtggaggttgttttggtgacactgtgtccccacgaagctggggatacccgtttctctagcttggagccaccaagatagaggacaaacacttctgtgattcagtccccagactgtctctgacttaatcccttgggttcaagccctatgtgggagagcaagggcacacactgcctaatccgtggtgtcccccccaggacaatggcgtctcttggccacatcttggttttctgtgtgggtctcctcaccatggccaaggcaggtgagtgcaggggaggctgcccgctacccacctcagccccaggggtggcggtggggaccgaagaaccaagttggagaccccaacctagactaagtcggctggggtaccaagaagtttgggggtctccacgtggggtccagtcacaggctggtatttgggggaggggagaggaagccccagatcaggcaaagatggggtgggatggggctgaatccccgatgggataactgggtcacagacagcctgccgtgagtcagggagctggggcagttaggtgccacctgccccatctgggacagtgcagagggggcagctgggacccagagagtgtgggcagcctgcccagacaccctcagactctaagcccagcaaggcagagcctccagtggtctcctcatgcccctccctgccaggaccccaggaagcattcaacccctgatttctctctctttccagaaagtccaaaggaacacgacccgttcacttacggtgagcggggggtctaattttgagtcctgggggagagcctggctttgctggtcctttgattccccctcgccctcccccagagtcccagtattgatatctctgtcattctccttccctctattttgtccttcctctctgattccacctgtctgcatcttttcctgtctgtgtctatctgtgtcactgtctatgtgatacctctctggttctctttctcttgcctgcgtctgtctcagcatctcgtggcccatcctctgcttcttcccgtcttctctcccccctgtcctcctcctccctgtcccctccctccctttcctatacacccctttcctctccctggtaccccactttcctcctcccatatctgctcccccttaattatcttacttccccccttctgcctgctggtcctttctccctgttccctccttcccaatttacccctctcctattctccctcctgtcttccctgccctcaccttccctgctctgctgctcacagactaccagtccctgcagatcggaggcctcgtcatcgccgggatcctcttcatcctgggcatcctcatcgtgctgagtgagtgcccctagctcccgccctctaccccgcctctccctggccccacctctctctggccccgcctctccctggccccgcctctccctagcccccctctccctggccccgcttctccctggtcccgcccctccctggccccgccccgccccaacccctcccaggccttgccccgcctaccctgccttggttccccggcccccggtctcgcctctagccccgccccgtcccccaagccccgcccctcgcgagggcgagctggagctacagcgccgcttggcgcccgccgggagggagcctcagcttctcctacctctccacgcccacaggcagaagatgccggtgcaagttcaaccagcagcagaggtaagacgcccctccccgccctccttcgcccgctcctgctctggagggcgccgcgggtgaggcggggagtacccctgacccgcagcccgatccccgtcagcgactatgtattaagcacctactatgtgccatggcccaagcctggccctgggaccaagcgaggaaaaaacctcccgcccttcctggccgagctcccagcctagtggaggcggtggccgtgggttccaacagccccacagatagaaaaatcacaaagcgtgataacacaaagtgcaggaaagaagaaacggcggtgaaatgagatcatctcacacgcggcccagtttagcttagagtcttgttcctagctctttgattcctcttcgaataaaatgttaaagcatggacaatgtatgaatatgttagaacaattatagatattatcataagtagtagctaatatttactgggtgtgtaccacgtgttagatacggtttcacttcctctgggagggaggtgctgttattaaccccatttgacagatgaggaaactaaggcacagggaggtaaagtcactttgttcaagatcactcaagtggaagatggggggttctgggtttccaacccaggccatctcatggcagtctgccaagtccccatgactatccctcccccaccaacttcacatccctgcccccaaatccgcggaggtactcactgttaaccagcttagaagccccctgccagcacataagctgctcctgggtgctcctcatttctggcggaccccgagcctgctcttcgtccatatctgggcctagttacaccaatctgggaaaggaggcttgtactggggggttcctagaagggcagcctctccccctttccatcccgaaatccctctgcctctgtcttcccaggactggggaacccgatgaagaggagggaactttccgcagctccatccgccgtgagtctggggagactgcgggtattctggggagagggctggttccaaggaccgcttttcccggccctccctggctgcgtagagggaagggctggatctgaaagcggagggcggggagttgccccgccgcgggccccacctgcccaggagctggggatgcctctccagaatgacccccgatctccgtgttccccccaggtctgtccacccgcaggcggtagaaacacctggagcgatggaatccggccaggtgctgcagctctgacacggcggtgggagggaaggagggaggaaggaaaggcgggagagggagggggccaagtgccagagttgaagggcggcgaggggtggggctggacgtcccccctcgcctctcacccttttcaccctcacaggactcccctggcacctgacatctcccacgctccacctgcgcgcccaccgccccctccgccgccccttccccagccctgcccccgcagactccccctgccgccaagacttccaataaaacgtgcgttcctctcgacagcactttgtcggtctcggtccctcagcgcgaaacgccagcgccactgggccccagcagggggcgccccaccctagaggaaggggcggggacgacggtggtgggcgggggcgggggcgggggtggcctgcacgggggcgggctccccgggcccccattggctgcaggcccccccacgccagggctccccccagctcccccccacatcggtccgtcctgcttccagctgctgcagcgcgccttcgccgccaaagcatccagcagccccctgctccggcccagcatggcgaccccgacccagacccccacaaagggtgagcgtcgtttggggagggggttgcaggggggctccgggatctgagagcctaggagagagggtgtcgggagattcaagcaatggtaaggcaagggagttgggggagggaggtccgctcctcctgtgggcggaagcccctgtaatgcgcccccccgatcgcccctccgggtctctgggacaccccctccccggcaggcgtcctgtgccagacctgcggttggagagtggcagtcccgggagaagggatgctcggacaggtcgctatggcaaccgggtggctggtcccgcaccgtggtggtagcagacggggaagagatgagcttgcagggtgggagcgggtgggtctgcgaccagagacgttctggaagatttcagggtccctggggtgggcaagggaaggggaggaggttcatgtccctcttctttccagtgctgtctcctagggtgtctgtttcctgaaacccttgacagccaggttcagaggaaaggagtgagagctgaaggaagagacagagagaagggatatagcaagagacagacagggagaacctggaagagacagagaccaagagaggcaggagatccagagtcacagatacaaagacccaggaagacaaatagatggactcagagagattcccagtggaggggagaggctgagagcagtagacagagatgcagagagagagagaaaaaaaaatgagagcctgggagatagtgggattgagaccgctatggagagagaagcagagagacggagggagagagacggacccatggggagagaggggagtagaaagagaagaagggagccatgtggggtggggcccaaaccactgcagtgagaccctatgtgtgggaatggggcgatgggaccctccttccagcccacagcaggggtgttttccaatcccagaggtgctgttgggtatacacctagctgcccctactgcccccatccagccacacactgatttccattccacaccaattaacccagttatgcacccacttaaacacccacttctaccgtcgccccctaatagcccccactgctaatcctgcttctgcagatgagcaaggcacagactgcttcaagagggagccagtgcccagcaagggtctccagcactgagggcaggggaccaggggtgctgagaagcccctggcagtgaagggaacccgaattccacttggatggctccctcccttccgcgcttcccagcaggcgggggctgctgcactgagccatatctgcagaatccgaagcagggcggggggtggggggggctgcagaggctggaagctaccctagggaggggggcagggctgaggcagcaggcctggcgggagcccagggcttctttttgcagaggtggtggttagcaggatcgatggcagcagacgggcagaggtgggaggacagactcctcaacccaacctcctctgcctccccctttcccagtcacagcatgacaggggaccgcaggtctcgggaaaccccgggggaggaaaagcatgttgtgcattgcaagctgcttaaggaaactaattaatgaattgttggggagcgaggggggaagaggggagagtctccctccaccctgccagagaacaggagggagagttaggagtgaacagaagagggatgcatgagcacagctgggtccgggtccctatccctgaaatggacccttagcttggccagaagccagtcctgcaggggcaacggcaggaggtgcaaaaggaggggagagggtcaagattgaaacctgcatctcacacaggacctcacaggggaccccacccagcctggggtggcgggacctatcacctctcttcacctcccaagatgccccagttgccatagcaaccacctccttcctgatatctctttggcagctggccaggagtagtgcacattcctttgcctgactcctggccccacccttagcccagccacgcctgagggcccaggttgccggggcagcagggaccagaggaggatcttccgcatggaggaggatcttccacatggaacaccagattctgggacaggggctcacccagtgggctcccgataactttggggaaggacgggtgtgtggaaaacagacaagtgagacaatccaccttttacagcctcctgcagcctaggactgcctcataatcattccttcattcattcatcccagaaaacttgaagagcctttcataaatgtcaggatgaacagcagtgatgagtcaaacaaatttactctctggtggggaaacttacacagagcacaagggaccctgaagcagcgtctcaccatcttggcgcttttgagtactaccgtcacaatttttgctttattcaaatattcctcacactgctatttatttaatttttttccttaaaaggattagcttttttatttttattttttgagacaaggtctcactctgtcgcctaggctggagtgcaatggcacgatcacagctcactgcagcctcaacatcctgggctcaatctatcctcctgcctcagcctcccaagtagctgggactacaaggcacttctgctacacccagctaatttttgtatttttcatagagactgcttttgctatgtttcccagcctggtctcaaacttctgggctcaagcaattcacccactttggcttcccaaagtgcttaggatgacaggcgtgggccaccatgcccaacccaggattagcttttgaaaacaacgagctttattttatagcaccatcacaactggaaaattaatcttctttttttttttgagacagagtctcgctctgtcatccaggctggagtgcagtggcacgatcttggcttactgcaacctctgcctcccgggttcaagcaattcttctgcctcagcctcccaagtagctgggactagcagcggcacaccaccacacccagctaatttttgtattgttagtacagatggggtttcaccatattggccaggctggtctcaaactcctgacctcgtgatccgcccaccttgtattcccaaagtgctgggattacaggcatgaatcactgtgcccagctggaaaattcatcttctttttgccttaagttgaaggcagcataagagcaatctgaagcaggtgatttcgcttttctgggtctggtgtcccccttccaggaaatggggatgaagatcgcacccatatgaaagagttgctatgaagattaagagtaaatgcgctgatatctgtcagatgcttagcagggaggctggaatggagtcagggctacccactgctggttacatcaataaataaaggagaaaaccaaataatgccacaaaattctgcctagattttattgcctgctgaagacttggagcccaaggcctgttttctcttaggtaaaggggggagattaacaagggttggaaggtggtaaagatacctcagcaccaacctaagccatcctctttgaagactagacagagacctgggaagggtaaacttacacattgtgtgaaccgtggtcttgctttggggccacctctatcagtcagtttcggctacagcatgctgtggtaacaaacaggtgttgctttggggccacctctatcaatcagtttcagctagagtatgctgtggtaacaaatagtaccaaaagtctcaggggcttatgacaaccaggttcacgtatacgtccatcacaggttgaccagtcaccaaagaaaactagagcagtcaccactgtgaacattcaggccaccaggctagaagtgaaacagagctttggcctggaggcctgaatgttcctgaatgtttaaatgccccagcctggaagtgacaatgcacttctactcaccgttccttggccagaattagtcacatggccctacccaacctccagggagccatccatctgagcctggaagggggaaggagaacaccaacgacatcaggcatcaccctggcacccctcaccctctccccatgtggcagacagtctgctgccaaattctgctctagggaaggccaaatataataagaactgtcagaggcattcgagaaccatcaggatgaacttgttgaatgggaaggatgttctgagctctcctgcaggggaacatgattagggtccaggaaggtgggaagtggagaaaagtgaatccagagacacacacacattttatccacatgtgaacatttctgaaatcattatgtgtcttctaatggatggggacatttcacgtggtagagttccaaacatatttacacatacacacacacacagggaaaactattacaaactcaattttgaatcttaaacttgatggtgccttagaaataagtaataatgggccaggcatggtggctcacatctgtaatcccagcactatgggaggctgaggcgggcagatcatcggaggtcaggagtttgagaccagcccagccaacatggtgaaatcccgtctgtactaaaaatacaaaaattagccagcagtggtagtgcacacctatagtcccggtccttgggaggctgaggcaggagaattgcttgaacctgggagatggaggttgtagtgagctgagatcgcgccactgcactccagcctgggtgacagggcaaggccctgtctcaaaaaaagaaagaaggaaagaaagaagaaagaaggaaagaaagaaagaaagaaagaaagaaagaaagaaagaaagaaagaaagaaagaaagaaagaaagaaagagagagagaaagaaagaggggagggagggagggagggaggaaagaaaaagaaataagtaatgtggggtatgaatcagcacagcttccctgtactggatggagtatcaggagtgagtggatgtcagcagtagcagcaggtgcctgtcggagctctcaggtgactgagaagttttagggagtattcaggggaagctgagacattcattggttcaccagtggaaatggggtctgttttaacctcatgacatcatgtgcaagtgggagtgtgtctgtgtttttcagggaatgagtccatagcttgcatcagacctccataggggtccagaaccaggactgccatgtagtttgagaagattgtacactgcatagaggatggtgctgactgatggagtgagtaggggctggaatccagcttgagctatgctcttccagccttgcggcctgccatgaggccacatcatccaaaccaaggggtctctatctgacttccacaaagaaatgattaggccagtggctccatctggatcctaaaaaatattaagaaatacactgttaagttttttttttctttctctttttctctgcttctttccctcagctcctgaggaacctgacccattttactatggtgagtgttggatttggggatagggctggactggggagtagctgcaggtgctcacagatcactccggacatggcttcagctgtggccacacgatacgtgctgggccactggccacgggaccatatatgtgggtgtggttcacatcagctgagttcatggagggcagaaccagatgggggagtggggatgcctcacactctctctgagcccccttcaggtctcaccgggatctgggctggtgccttggtgtcgccagagaagcagatgaaggaaaaccttagaagcaatgactctgagcccaggctgcctggatttgaatcctgccttatccactcactagctgtatggccttgggcaagcaactttgcctctctgggcccttctgtaaacaagggatagtaatagttcccacctatgaggactgtgggaaagatacctgactggtggcattaaatctcctccatggcactgaagctcaaataagctaccccaggcctggtagatcgggctccagtttcccctctgaacaccctcctcttgcccccaccccacccctttgctcattcatactttttccctaggtgtcaatttctctcccatctcaggacctttgcgtgtgctatgattctgcagtaatgcttctcctttgtacacgaccggctaaggctcccccttattcaggcctcagatcaaacatagactactctactgggataggccctcctgactccctggcaaggaagagccacaccatactcagctggtgtcgcatgacttgtttttgagggggattgtttctttaatgttttatcacaatacgaaagtcaactccttgctggtagaggcctggaccactactggtacagagtgagtgctccataaattcatatctcaacaaatacttagcgggcacaggctctatttctggcaatgttccaagcagctggagacactgcaatgaaccacacagacaagaattcaagaatgcaagaattcctgccctcctcctggaccttccactcaatgggaaagggacagatactcaagaaaacaaaatatgaaaattatatattagacaagaatattattggccaggtatggtggctcataactgtaatgctagtgctttgggaggctgaggcaggaggatcgctcaagtccaggagtttgaagctgcaatgaactatgatcgtgatttttttttctttttttagacaaagtctgactctgtggctcaggctggagtgcagtagcacaatctcggctcactgcaactcccgcctcccaggttcaagtgcttctcctgcctcagcctcccgagtagctgggactacaggcccacaccactgcacctggctaattttcatatttttagaagagacaggatttcaccatgttggccaggctggtcttggactcctgacctcaagtgatctgcctgccttggcctcccaaagtgctgagattacaggctcattacaggcatgagccactgtgcccagctctacataaaaaatttaaaaattagctgggcatggtggtgtgtgcctgtagtct[134 bp omitted]aatattatgaggcaagaatattaggcaagaataattcctatgaagtaaaataaagaagggaatgagattggaaagtgtggaggagaggatggaaattctgaataggacagccagaggttttgctcacaatcaaataaagcccagacactggtgagggaaggagccacgtggatatttgggggaagagctttcaggctgcaggaacagccagtgcaaaggccttgggataggatcatgctggatatgccccaggaacagtggggaggccactgtggctggagtaggattgatggggagagtgaggtggggtgaggtccaagaaggaaaggaactggatcatatgggactttgagggccctagtgaggaatgtggtttctaccttgagggcaatgggcgggaggagggctctgagcagaggagaaaccagatctgactcaaatgttgatgggtccttgtggctatcagaggtgggagtgcaggcaggccagcaagaccctagagaaggctgctgcagaggccagatgggcgacaatggtggacagaaccagggccagggaggaggtggtagagggagagtattatatatatatccagggtggaaagcgcagggggagagggcaagggaggaaagtagagggtacagagggcaaggggagctaacggtgcccaagcccacaccctacatcctcacatcaaccccctgaaggagtgtccagcacagtccacagcctccctgggcgattctgggttcctggctgggccacccagagccaggactgggctccaggtgcagccaaggtgctgtccctgcctcgatgtcccccattatcttccccagactacaacacggtgcagactgtgggcatgactctggcaaccatcttgttcctgctgggtatcctcatcgtcatcagtaagtgcgacccattcctgggctgcctcagcctccgcttcctctgctggctttcatccatatcctacccgctatgtcctgtcttcttgttctgtctctctctcccaacaggcaagaaggtgaagtgcaggaaggcggactccaggtctgagaggtctggcagcagtgggcaaagagcgggagggggcctcggggtgcctccctagcagatgggcaggatccactgggcctgccatgcgttttccccaaagcctatggttattgaacctctttctacttttctctctcatctctgcctccacagcccaacctgcaaatcctgtaagtctgagcttccctcttcaggtgagggtgagaaactgtgtggttctgggagagttttaggtggggcagggaagggaaccctcagaagggaagtcgcggggatggactggacgcagggggcggagggggggtggtgcctgcagatatcacaggacaattccctaggaagctgaggaaattccgcagatgaaagatgctaaacctggctgggcgcggtggctcatgcctgtaattccaacactttgggaggctgaggcaggcagatcacctgaggtcaggagatcgagatcagcccggccaacatggtgaaacaccgtctctgctaaaaatgcaaaaattagccgggcatggtggtgcgcacctgtaatcccagctactcaggaggctgaggcaagagaatcacctgaacctgggaggtggaggttgcaatgagctgaggttgtgccactccactccagcctgggtgatagagtgagactgtcaaaaaaaaaaaaaaaaaaaaagaggaaggaagaaatgaaggaaggaagggagggagggagggaaaagaaagatgatgctaaaccgtggggaggctgtgggatgtgacatgtcccagagtccacagagattcccagaaacaaatgctcaagcctataaaagccaggacaagctgatttgccaggagaggaagacacaggcctgtgaagagaagggccccatgtgggaggagctctgtcaatcaggagggagagagagggagcactgaggaagacggggagaggctttccagacttgatcgttcagccaggcagatccaggatgaaatagccgaggaagcgggacagagggagggagggaaggtttctgaatagttgcatcaaaataacaaaaagagagatgaatagaatgcagattttagaattcacattggaaaagaacatatgggatgcagggaatgtgaggatggagaagaaagctgggaagaacaggaggggagagagtggagaggacggaggtgttggggagaatgtgggaaggaggagcccaggaaggaaggggaggaggatgggaggaggagggcgtggagggtggaggagggagaatgggtgtaagcatggaaagtgtaaagggagagcgagagggatgcagggcaagcatgtcaacgaaagactgatctctttgaggctgttaattttaattatgtaaaaataacttgacctgtttttagtggaaatgcagcctttctggagacttgtaaaagaacagaaatgggaatttctgtgtctcttataaagttcttataactaaaaaaaaaaaaaaaaaaaaaaaaaatgcgggagggggacacgggttattcaatggttgagaagtatttggtgtggaatttgtttcacgttcctttttttttttttttttttttttttttttgagacagagtcttgctgtgtcctctgttgcccaggctggagtgcagtggcacgatctcagcttattacaacactgcaacctctgcgtcctgggttcaagcgattctcctgcctcagcctcccaaatagctgggactacaggcacacaccaccacacccggctaatttttatatctttagcagagatggtggttcaccattttggccaggctggtctcaaactcctgacctcaaacgatccgccatcctcggcctcccaaagtgcttggattacaggcgtgagccacagcgcttggcctgtttcatgtttatttaatgagttttaaaacatgaacaaggcacttatggatgcgtggggcagcatgggggttggccttgtcacctggggcacagctgaagactttgcacaggtttctggtctatcctaggtgaatgatggtctgcagcgggtggggaatgggggacttcccgttgtatccaaatgttcaggacagggagtgtaggaaaggagtgagggtgtaggaggagattgcaaatgggaagggagatggggactccctttctggcaggcggatagccccaaaagcccaggttgggtctggggtcgccagccccgtagcaggtgtttctctccatgacagcagccaggaggtgtccccaagggaacaagacattagagtgtgggaggcaagacagctcctcagtgttagctctggggtgacagtccctggggtctggcttccatggtgccggggaatggagagccaacgagctgtggggagggaggcagtttccacctttctagtggctcacgcaccccctctctccccagcccctggtggcggcggcgtgtaacaccttcccgaggaaactccgctgccgaccctgcctgagcgcgggagcctgaggaccgggtggaggcggtggggacccagccgcgcgccgggagcgctccccggaatgagccgccccacccaccccaaggctggagccgctgcaccctgctgtccctctccaggccttggcaatgacgatcccccaaagagcccgtctgcaccccagacccagggcctcaggcctccagctcctgggatccgggagtccatcccggcccagcacccccagcatccccgtgtatggcccccctgcacctccttgtctcatccccgaagatccgtccccctggcccctcagtgtccatgtcttgagcttaataaatgtgcatttggttttttcctctgttctgtctgtgtgttctcatctgtggggcacggtgtgggtaggggtgcagaactgaacctggggtagctctcccctgcgtgcccggagtcgccccctcttcattctcctcccccagtgccccgagatgccccccttcaatcccttctccttcctcaacacctccggatttgtcctttcccttcctccagcgaccccagaatagagccctcccgtttctccccctgctctctcagaggcgtccactcaccctagacctgcctgccccatccccgttcccaccctctcccaccactatgccctcacccctgccccccgtcgccctcagcgattccccctcctgctcccaccccgggctctgaagccaggaaacccaagaggaaatgactgagcccgtctgggtccccgcccgctcgcgctcccctggccacaccctccgcctggacgcagcagccaccgccgcgtccctctctccacgaggctgccggcttaggacccccagctccgacgtaagtccctctcgtgcgccacctccatccgctgcccctctgcccacgggccgggctcaggtgggtaggggtttgaccccttccgctcctctccgccccccatccacgcccacatctctctgcctcctctcctgggctacagtgggccgctctgcctcgctcccgcccgcctgcctcagtctccccagctctctgccacccccctcggaccagtgcctcttaggtctctccagcgcgccatccctgcaaggcggcccctgacaccaactcactttttcctctgagcgcgggaggcgttactcactcttcctccttcccctcctcgccgactcccgggctctgggcccctgggggagggaagaggcctcctatctactcctctgccccagtcccctccttgcgtcagtcccagtgagggataagcgcctggcggaaggcgcagggaggtgtttctctgcttcaggagtgcccgccggcccttgcagctgctggaagacccatttatctcatgcttcttgttttctttggggacctgcaggggaaggaagcagggtgacggtttggtatccccacctaagaccctcccctttcccctgaggccagccgtcagcccctggcagggggtcttggaagccagaggtttttgctcagggcagggaaagggctgcaggatccccgggggctgccggaggtcggtctcactgacatcatggctgaccccagcatcgcctggtcccacagatgtcgccctctggtcgcctgtgtcttctcaccatcgttggcctgattctccccaccagaggtaagacccatctctggcctccaccctgccccagagcccccagccaggccagccccacgtgtgctgcggggtgggtggttggcccgtgtgaacgttgtcctgccctgtcaccctcccgctgagccggcaccaggaagtggggatccctatggcggggcgacgttacaccctctttggacacctcagacccgggtggctgcttccagtgagtctggccagggcctgtcctgctgagcatcctccaatttcacctccaagaagaactcactgagtttcatttggcggggagattggtgtcggttttctactcagcagccaggaaacctaggctcccagagtccccaggcattacacagttaggcaaagctgttgagctggggttagtccaaagagttggcaacatctcagccttgcctggaaagtgtctcctgaaagatgggaaccacaggggggtattgatcgttctttctgtgtggcaggtgtggtgtgtgttaggtcagttaggctttgcctctgacagtcagtcacacctgttgtcttgcccattttactgatgaggaaactgaggctcagcgaagggaagtgccctgtgtcagaggagaatgggtggaggagctgagaaaacaactgtcctgcctgcccccagaacccagggtgcatgccccactgaaggcgccctcatttctccttcataaaatgattttcatatactcgttcagtcatttgacaaatatttattgagcacctactatgtgctagatattctgtgcactggggaaacagcactgaataaaacaagaggtcacactctagtggagagagacaagttagtaaattatatcgtgtgctaggaggtgatacgtgcttgcagaaaagtagaggtaatgaggattgtttaaactgggtggtcagggagggcctcactgaggaggtgacatttggaccaacaaacacttggaggaaatgagggaatgagctttgcaggtgtctgggggctgagtgttgtctggtgtgttttaagaatagcaggcaggtggggtggctgggttgggatgagaaggggcagagtgggatgacgagaggacagagaagtgatgggaccagatggaggaggacttacgggccacgtgagggctttgcttttatgtggagtgaagtgcagccagggcagggctctgaaccaggcgggccccgacctgactcaggtggtcccaggctccctctggctgcaggttggaacagactgtgggggcggagacaggagcagggagcccaagaaggaggctgctgggatgtccaggctggagggtacagaggcaggaccaggatgggggcagtggagttatccagcactgaccacatggtaagccgtgtgggagaccctttccctgctctgtgtcatttcaccctatctacagccctgtgaagtagattcagttattatccctgctttgcagatgaagcaactgaggctcagagaaaggacttcacttgttccaggtcacacagcaagaaagttgttgggggcaggatttgaaaccagggcccaggctcaccctagcacctgggctcactagactaaactgactttcccatcccacagggatgggcggggagggggactagaagaagggttcccaggcattggcatagctgaaaacactttcagaattatggattgatgcagccaaagctgagtgattccaccagcagacaggacccctaaggtttcaccagggaggcgagggcgggggtggtgagaggagggggaccaggctccctcctgacttctcatccttgattccccaggacagacgttgaaagataccacgtccagttcttcagcagactcaactatcatggacattcaggtcccgacacgagccccaggtgaggaaagggacacatctatcaagatcctgtcattgcaaataacaacagcaacaaaaatcccaaacttggaccaaacaagggaatttatggatttatgtaacgaaaaagtccaggtacagaccttcaggcatggcttgatctaggtgctcaaatgatgctatcagaacctctctccacctcttggttctgttttctctgtgttggcttcattttcaggaagagtctcctctcatggggccaagatgatcccttgaagcctggggctgtcatcctgtctgctaagaatcccagcaagagaatttcctttccccagtccagcaaatgtcccagaactgagttatctttggccaggctcaggtcgtatccctgagctggccactgtggccacaggcatagaaagctgattggccaggcctgggttccatgtccaacctccaccagggctggtgtcagccccgctgaataaagtggaccaagagtcagggaaggatggtccctaaaggaagttctgggggcttttatcagagcaggtgcatttgggaagctgagttaaacatgtttttttaggcagcacttctcagagtcttgagaaagacaatttgcagccagcatctcgaagaaggagctgtagtgtggcatctgtgggacgtaaggtcccaaagaaggggacatattggttacacatttcggcagttagcaaatggctggattaattaagccatttctattacattaaagttgagttgctacgggaatctctggcatctccacccatagaccttgcccacttctttttctctctccttttctctccgtgactccttgtttctggactccagatgcagtctacacagaactccagcccacctctccaaccccaacctggcctgctgatggtgagtagtgcaggggcaggcggcggggacaggaccaagacaaacaaagtttcccctcttcctctgacactataggtctttggttgcccatttcagtccctactcccagctctgaatgccctggtttactctgggtggggacagccaactccattcaattctttagaaaaagaaaaccaaaacgcttttgaaattgtgaaattaacatgcatatagaaaaatacaaaacccataaatttacagtgtaataacttactctaaattgaatccctatgtaactaccaaccgggtcaaggagcagaactttgcaaacacccccagaaagtctctgtgtgccagtcccatttatttcttcctttcatctcttttttctctgatcccttttttgaattttttgaacaatttttggacgttttcttgaagtataattcaaaaagtgctcccggccaggcacagtggctcatgcctataatcccagcactttgagaggccaaggtggatggatcacttgagctcaggagttctagaccagcctgggcaacacagtgagactccatctctacagaaaaatacaaaaattagccgagtgcgttggcgtgctcctgtagtcccagctactcgaaaggctgaggcaggagaatcacttaagcccagaggcagaggttgcagtgagccaagatcttgccactgcactccagcctgggcaacagagcgaaaccctgtctcaaaaaaaaaaaaaagtgctccctgattttttcaatcgatgtttaaagacacagtagtacaaaaacacattctgcctggaaagaataaaatgattgtaggcaaaactaaacccctttgtcacctcccctccccaatcctcgttctctccctctgtctctgagaggtccccactgtcagcattggggtaggtccccagtgataccacatcccatgtatattacttggagaaaatgcactgactgtgtgctgtgtttgtgtgagcttaaggagaccttatgattgttctgcagcttgctttgtttcttcgtgcagtcgtatgtttggaagttcttctcacatcactgcataaagacttgttttgttttctctcctgcctggtattccacaaggcgcctatatcacagcttatggagtcacacacttcttgatgaacatgttggctgtttccagctttttctgtctacacacagcaccacaatgagcaactttgtcccttcctccttgagcaaacgcacttggaatatgtactgactatgtgctggtcatggttctaaatattttgcgtatgttaactcattcaaccttcacgcaaaccctaagaggcagaaattaccattgtccccattttacagacaaggaaacagaggctgtgagtaactggttcaaggtctcacaacaagtcagggacgcagctggaatcgaagtccaggaatctggcaccagagcctgtgcttttatccaagacaatacagggcaaaggacatgcatgcttaatgttttaaaatttgccctcctgccgcccaggcacagtggctcatgcctgtcatcccagcacttttggaggctgaggcgggtggatcgcttgagcccaggaatttgagaccagcctggacaacacagcaaaacctattctctacaaaaagtacaaaatgattagctgggcatggtggcatgtgcctgtagtcccagctacctgggaggctaaggcgggagaatcacttgagcccaagagttcaaggctacagtgagctatgattgcaccactgcactccagctcaggtgatagagtgagaccctgtctcaaaaataaataaaagtaaaaataaaagttcccctcccaagtgactgtacccatttcctaacccaccagcagtgtgcaggagtgtcccccttcccaaccctacagtgacacttggtatactgacattttcaggttttgccagcctcttaggttttttctgagatggagttttgctcttgttgcccaggtcgctgtgcaatggtgcaatctcggctcaccacaacctctgcctcccaggttcaagcaattctccctcagcctcccgagtagctgagattagaggcatgagcgaccacgcccagctaattttgtatttttagtagagacagggtttctccatgttggtcaggctggtctcgaactcccgacctaaggtaatctgcccgcctcggcctcccaaagtgctgggaatacagacataagccaccgcgcccggccccaattctctttccccagtgactctttcttatccttccctccttgctctcctgacctgaatagaaacaccacaaccccagacccagacccagcaactggaaggaacggatgggcctctagtgacagatccagagacacacaagagcaccaaagcaggtatagcatgggactgagagcagcagcctacgatttttgtttaattctctatctaggtcaacatttccctcagtacgtttctcagtgcccctgtttggggaattgttaatacatttaaaaaaaatgtttttggtttgtggtcaaagttatttggggaaccctgagttaaagttaaccatgtttctttgtggcaggacttctgagagtcttcattaagctaattttcagcaaaggatccccaaggggcagcgtgcagtatgcagtgtttccctaactgatagactttggaactttctttctgtcagttcccctcggagggctggggctatagaatgtgcctgtggatatttcttttttgtacatctccttaatgttagagcaggagcttttcagttgcaaaatatagaaaattcaccttaaacacacacacacacacacacacacacaaaagaatgattggctatataagttctggaaagtccagaagtagccaacttcaggcatagctggatcaaggcgagtaagcactgtcatgagtgctttgttccctctcttggttctgttgtcttcattctctactaacttctcccctcttgatggcagagatggtcccatagttctaactttaggtcacatacgtggtggctagagaacaaaatctttcccattatttctagcctgaggcctagaattgactctcattggttcagctggagtcacatgctcatgtctgaaccaatgagagcctgagaaatgagctgctctcattggtcaggcctgagtcttgtgccccaccctggggctagagaagaggctcagccagccatgcctgaaccacatagaccaagagtcagggaagaggggattttcctttggacaagtgagttagtattaccagaaggtgtgggaaaggagactgagctgagataaggcaacagatcgcctctaatgcctgcgtgatgatccttatttgaggggcagccccacactggaaagtgttgtagagtaggccactcccagagagacatgtacagttgtgcagactgggtactgaacgagagcaccacctctcgggcaatgccattccctttgtcggtctttataattgttccagttttctagtgatagcagcaaagcatctcattcttacagaatctatctattaaaacaatcctacaatggatggaaataaagtgctttacagaagggaacttttctagtttgtacaaaagtgcacctgtaggggtgggggatagcagctgtgtccacacttatcaatgataaagcattctcacatcactgcattaatttactgagtctttgctgacctgagttgctctatgtattggtccatgttcctggatatatgtgacagaaattcatcaaggacaaatggctgtcactgctgagcctctgggttgcctagaggctgggcatgaaagcccccagggcctctcttcctcctctatctttgcttctcttccacctaggaaggaaatggctcatgttatttgagcctcctagctcaaaacttccagacttcacctagggttttaatctgctcaggttacgataacaaaataccacagactggatggcttaaacaataggaattcatttctcccggttctggagatgggaagtccaagatcaaggtgccagaagggttggtgtctgtcgagggctccccttgggtcacagacagccattctcttgctctgtcttcaccatgtcctctccatgtgtgggtgggcttgtgagcttgaaagcaagctctctggtgtcttcttataagggcactaatcccatcatgagggccccaccctcatgatcctatctaaccctaattacctcccaaaggccctcgctccaaaataccatcacatggaatttggtggggtggatagaattcagtctatagtacctagctgtcactcaatatccctacttgggatttcaaaggtctcagggaaggaccagactgaggtcacaagcttccttttgtagcctgggttataactggggaagggagggcaatgtcttcccacaaagaaagggagagctgttccagaaggaggaagagtgctgagcagacagtaatagcaatggctgacttttgctgagagcttgttcatgctgggcactgtgctaagcttctgtgtattcagtcatttgatgcttgtgatcatcctgtgtggtgggaactgtcattactcccattttacaggaaaaggaactgaggcccagagaggttactcagcttgccctaggcaatacagccaagagtggcagaaccggaatttgagtccagactgtctcaccccagggtgcatgagcaccacacaccagtatggctgtccttcgcattcctgtggtctctgccgtggatctggcttataccttcctctgggcaatgcattccctgaatatcttgtaatccttggttgccagttcctatttagggtgtggggcactgagataattccagggaacttgggtttcacgagggagcttctctgtctgctggcttcttgttgaggcctccgatgtggtgtgggggcacttctcagtgcttgggggaggccttttctttggaggtactgatttttttttttttttcaagagaagaatcctttggtattttcggtctgggggcagaggtgatattcagaatagttttgttgttgttgttgtttttgagacagagtgttgctctgttgcccagactggagtgcagtggcgaaatcttggctcactgcaatctccacctcccgagttcaggcaattctcctgcctcagcctcccaagtatctgggattacaggtgtgtgccaccaggcccagttaatttttgtatttttagtagaggcggggtttcaccatgttggccagactggtcttgagctcttggcttcaggtgatctgcccgcctcagtctcccaaagtgctggggtttacagacatgagccactgcacccagccaatattcagaatgttttacaagtttctccagactatgtagctgggtcagagtccttggcaggtgttgccctttcgttcctttatctcctggattatagtgtgggccagaaggtcctaggagaggggtctggagtccctcggggattgaggcagatcagatagtcgcaaccggggctatgtgcttatttcagcatttcaatgcctgtcattacttattgcctctaggtgtggagtaggggggatgcctgaccctgcacaccagctgtgtagatgtgggagaggggtttcttccagatgcagactctcagtaatatcccttgtttctgcctccatggctcactcctgccctccactgatctggccactctctcagctcatcccactgatgacaccacgacgctctctgagagaccatccccaagcacagacgtccagacagacccccagaccctcaagccatctggttagtaactgcctccccagactggaaacaggctattttctgttcactgtgtatttccagcacctggagtacagcccagcacagaatagttctcagtaaagacgtgatgggaaagtaaatgacttcaagccaggcagagggtgggcacatgataaatgtctgaatagataagtgaatgcataaattattgctgcatacaaaccacctaaaaactcagtggcttaaaaggataaccatttatttagctctcatttctgcaatttggaaatctagggtgtgctcagctggctggttcttctggtttcagctggacttactcatgcgtctgaggtcagttgtgggtcagcaaggacctctgtttctaggggcaatttgattctttccctggtgatcttatccaccacttcctgcccagtcagccccccagtgaatgaatggaaatgatacgcccatgggtcacatagagagcccattcatccattcattcaacaaatagtcactgagtacttgtgtgctaggctagttctaggggacagagatagagtggtgaacaagccagaaaaaatctctgccctcatggaactactattctagtggtaagagaaacacaacaagaaataatcataattatgtatcagttgatttcaacttgctatcaagaaaagtaaagtagggttagagagtgactggggagtacaggttgagtattccttatccaaaatgctttggaccaggagactttcagatttcagattttagaatatttgcattatacttaccagttcaactttcctgacccaaaaatctgaagtccaaaatgttccagtgggcatttcctttcggtgtcatgtcagactgttactggaaaggggttccgatccagaccccaagaaagggctgttggatcttgcacaaaaaaagaattcagagagtccatagagtttatttagaaagtaaaggaataaagaatggctactctataggcagagcagccccacaggctgctggttgcctgtttttatggttgtttcttcgttatatgctaaacaaggggtggattattcatgagttttctgggaaaggggtgggcaattcccagaactgaggattcctcccctttttatactgtatagggtaacttcctgatgttgccatggcatttgaaactgtcatggtgctggtaggagtgccttttagcatgctaatgtattataactaatgtataatgagctgtgaggatgaccagaggtcactgtcattgccatcttggttttggtgggttttaactggcttctttactgcaacctgttttatcagcaaggcctttatgacctgtatctcgtgccgacctcctatctcatcctgtgactaacaatgtctaacctctggggaatacagcccagtaggtctcagccttattttaccctattcgagatggagttgctctggttcaaacacccctgacatgacatcaaaaagtgtcagatttggggacattttggattttggatttggggattagggatagtcaacctgtatttcatatacaaaaccagggagggccccactgggaagggagtgaaggagggagccatgcggatgtctagggaaagtgtgttccaggcagaggaaacagccagtgcaaaggccctgaggtgagaaggtgtctgcatgttcaacagcagggaggccagtagggctggagtgcagggagtgagggggataggaaggaaatgagattagaggaataatgggagccagattgtgtgccatggtgaagattttgggttttgttctaagggtacccaggtatccccctttcctgactttgccattcacgtattcacttcacaaacctttgctgaaccctgacttgctctttgtctgcctctccaggttttcatgaggatgaccccttcttctatggtaagttatccacaggaagatgtgggggaaggaaaggtgaggtccgtctgactctaccccttcatttttctctctgcagatgaacacaccctccggaaacgggggctgttggtcgcagctgtgctgttcatcacaggcatcatcatcctcaccagtgagaactggggttgggtgggaaggacaccaagaccaggagggggacttatgacggagggctgggttctcaaaggtccctgggcaattttgttttaaatgaggtatctattagctgcatatacatacaaaccaccacagaattcagtggtttaaaataatgaccatttattgagctctcaataccacagtttggaaacataggctgggctcagctgggtgattcttctggtctcaactggatttactcttgcatctgagttcagttgtgggtcagcaggaaactttgtttctggggtgccttggctctttgccacatcatcttatccttcactaagctagcctgggcttgttcgcatggtggtggcagggatctaagatagagtgaatgcatgcaggctcagaactggccattatcacttctgcctcattccataggtcaaagcaagtcatgaggctgggtttcattcaaggaaatagactccacctcttgatgggaagataggcaaagtcacatggcaaaggacatggatactgacagggaggggtagagactaagggccatttggcggtcagcataccaccccagcagtcacaagcccactgcacccaggcctggcagggaacaagggctgaaaaaggctgtgtcaggaggagataactgaggattaaatgcctcatggaacaaccccacccactcaatccagcaagaatagaggcttgaagcagccagagtaactactcttttaagagcttaatgtttctgtaaaatcttttggtactcaaatgttgacagctgtgttgatcagggtcatggcaggtggcagaaggacctgcaaacgattaactggagaaagtttaatagagtgatatctctggaggtacaggcagggcaatgagatggtgcagtgccctaggactagcaaggatggggacctgttatcccccagcctgagggacaagaggaggcactggctttgcaggaggcctggtgagagatggaactggaggtggggctgctggcaggagctgtggcctcagaaagagggttccagccactgcctcacttgtgaccaaaccaggagggagcaggggtggtggggatcagatacctaaacctccctctcctcccacccccctgtctcctgccaatgcttaaccagagggcaaggggcccagggccccatgcagggagaggaagttgtggggaaaggcagaataacaagcagagaaactaattttttaaaaaggtttttaaaatgttgtgggtgaaataaaacacgagctatcagttaatctgtataaccaatgccaagtttcattacctctcttgtccaacttcctcatcaagaaaatgagcatagccacatctttttttgccttaaggggagaggcagaattctaacaatcataagacatgattcctgatgtgtgcgtgatccccactgaatctgagagtcaagcactgttgcctcggtcatacaacatgtatgtgttgatcctgactttgcaccaggtcctattctcaccccagtggagaagttaaggctcagagagttaaggagtttgcctaaggtcacacagcacagaagagtcagtaaattcatttgctggcgggacacggtggctcactcctgtaatcccagtactttgggaggccaaggtgggaggatggcttgagcccaggggttcaagaccagcatgggcaaaatagcaagaccctatctctacacaaataattttttttacttaaaaaaaaaaaagaatcagtgaaggattggacccaggtttgtgtgagagcagagcctgaacgttagctctggggccatgtatttttccaacagcaaatatttgtgggctcctagtctgtgccaaacctgtgctgggtgatgctgggggcatggtggtgacaagcagccctggtccctgtcctcaggagctcacatctggtcgaagatgataagcaaataaatgcatgaatgagtggatacagagaaagatatttgccaaataaagcagagtgacagggaagagaggggtggggagagaagccctccctggagtggtgaaattggaactgatccctgatgatgagatgaatcaccaggtagagagagcagcaagtgccaagccctggaggcaggaatgagctgcgcccattgctatagcagcagaggaggcaaagtagccaggacagggtaggttgggggagaggagaagacgaggccagagagctgaggggctggaggaggcaagggtggcaggtgttttctaaagtacccttggcttctaagttccccctccctcactctggagcagccacagatgagtctctggaacccatctgtgtcctcgtacctcaaggcctttgcgctgctgttccctctgcctgtaacacccttcctccaggtgtctcccttacgtccttcagacctttgttcaaatgtcacctccttggcaggccacagtggttcacgtatgtaatcccaggactttgggaggctgaggcaggtggatcccttgaggccaggagttcaagaccagcttggccaacatggtgaaaccctgtctttactaaaaatacaaaaattagctgggcttggtggcacatgcctgtcatcccagctactcgggaggctgaggcgggagaatcgcttgaatccaggaggtgggggttgcagtgagctgagattgtgccactgcattccagcctgggtgacacagcaagactctgtctcaaaaaaaaaaaaaaaaagtaacctcctcattgaagccccagtagccatccctgtgaggatgagcccagctcctgggcctccatgcctccttcctggccttatttccctttgtaggacttaacaccctcccacttagcaccttcatacatttgattttgtaatttttctccttgttggtctttccccatagaaagacaactctgccagggcagggatttttttctttgtcctcaactgtgttcttagtgcctgaatgaatgaataagtgagatacaaaataatgggagtttccaaacggctcatctgtgagcctgtgtgggaagggcctctcgcagggccccagcactggctgttctcggtgtgtttctccatcatttgtttatggagttgcctttgagtttcccgaggggcagggttgatcaatctggttccccagccccacaacacacgataagaatcaatatcactctagctcgtgactgaatcatttccttcacccacaggtggcaagtgcaggcagctgtcccggttatgccggaatcgttgcaggtgagtccatcagaaacaggagctgacaacctgctgggcacccgaagaccaagccccctgccagctcaccgtgcccagcctcctgcatcccctcgaagagcctggccagagagggaagacacagatgatgaagctggagccagggctgccggtccgagtctcctacctcccccaaccctgcccgcccctgaaggctacctggcgccttgggggctgtccctcaagttatctcctctgctaagacaaaaagtaaagcactgtggtctttgccccaggatctctgatcatttgggacaggggagtggaaagaggaggcaggggctgcctcagggccctcaaggaataaagcaaaggccggacgtggtggcccacacctataaccccagcactttgggaggctaaggcgggaggatcacttgaggccagtagttcaagactagtctgggcaacatagtgagaccttgactctacaaaaaataaaaatattagctgggcatggtggtgcgtgcctagagtcccagctactcaggaggctgaggcaggagaactgcttgagcccaggaggtcgagactgtagtgagctgtgattgcaccactatattcctgcctgggtgacagagtgagatcctgtttctaaaaaagaaaaatataacaagccaaggcagggaataaagttagggaagccagtctagtgtgtggcagacaggatggcggtgggcggttgcaggtgagtctgtgtgctgggtgactggccagagagagagtcagggctggcttctgcctgcagtcagtttgagaacactggcgtggtccccataagggagcaggtacccagtgtcagctcacccctaacatttttaagggtttggaggtcccagatcacagggatcccctctccttcctacttctagtcccttcccacaccgggaggggccttgcacacatgagtgtggatgccacagcctgcacctccaagctctatccacagcccccaatacacaaatggccaccctccagggcacttcttggcttaggaatgtgtccaccaagaaggccctgcaggccccagcatgggcgcagagcaatttgggagaggaattcaggggtcctagggatctagaacatggtcgagaagagcataggtgctggtgggcacttcctgaaggcccttgggctcgaccagattaggccagagcaggtcccctgaagtgcaggacttagaccagagctctactcaggcttaagggtcgtgccaaaatcaagagacaaggtcccggtcacagggcttacataacagtgtttcacaacttcaggtcatagcccattcatgggttactaaatcagtttagtgggctctgagtagcataagaaaaaagagagaaagaaagaataatttttaaaagacattagtatatcactaataaatgtaagattgtatatatataatatacatagcatgtcatatacatcatatgcaatataattatatataatgtatagaatatgacaattataacatatataattgttattaatgcatcactataaatgttattactgcatcactaatctcaaatataagactgtatatataatatgtagcatgttatatacattatatatgtatgcatatcttcattataatatgtatattatacacatacagggggatactaaaattatttcattatttgcacctaccacataaagcagaacagatgtctaactgatcaggaggggatgtcatctagatatgagtatacatttacatatacaatggattatgtctttttttttctcttttttttttttagatggactcttgctctgtcacccaagctggactgcagtggagtgatctcagctcactgcaacctctgcttcccaggttcaagcgattctcctgcctcagcctcccaagcagctgagatcacaggcgcccgccaccacgcctggctaatttttgtatttttagtagagatggggtttcgccatgtcggccaggcttgtctcgaactcctgacttcaggtgatccgcccgcctcagcctcccaaagtgctgggattacaggtgtgagccaccatgcccagcctgattatatatattaagttgaataatttgaaaatgtcaatattcaaatgtgtttgacctataaaactagcaatgtcatatggctcaacctaacagtatacatgatagtgtgatatgaaatgcatttcatactgcaggttgctttttgaaaacgttgagaagcactgggcagtgggggacataggttgtggcagggaagataaatttccggttagaacaggaaatgctggcagctatttttgcctgctggctgggtggtggccacaccagtgtgtgcaagatgtttctagtacgatagttctcaaacttcaatcatcacatattcccaacttatgacatattttcaccccatctgtactattattctctcttttaaaagatcaactccctttttagtttaaacatatttattttaaaagccacaatcatgtatggaaaatcagtactgcttgatatagatagaagatagctataaagataaatccaaggccaggcgcagtggctcacgcctgtaatctcagcactttgggagggagaccgaggtgggtagattatttggggtcaggagtaagagaccagcctggccaagatggtgaaaccctgtctctactatataaaaatacaaaaattagctgggcgtggtatcgcacgcctgtagtcccagctacccaggaagctgaagcacaaaaattgctcgaactcaggaggcagaggctgccgttagctgagatcgtgtcactgcactccagcctgggtgacagagtgagactctgtcaaataaataaataaatccagtgaaaagaaatgaagatgttatgttgcattctagctgggtctggagtttcttgcagagggctgtgaaccagaggcctgggtctgtggtgttggagggagaccctcaaatatcagggaggtgatcttcacgctgctgcccaaagaaactgcagggtttgggagtttctttggaactctcagctctgactgtgagtctcacttctgacaccagctgcgggtttgagggttcccgagggtttgacaattcactacaaggactcacggaactcaccgaatgctctcagactcacagttagggtttattatagtgaaaggaaacagatgaaagccagccgaggacagagacacatgcggaagcatccaggaatgtcccaagtgcaaagcttccagctgtctcctcccagcgctgtcttctgcgggcacccatgtgggacagtacacgcagagtgttgccaatcagggaaacccactcgagccttggcgtccagagtttttactggggctcagtcacatagacgtaattgaccacacgtgtggccgacattagtttccagcccctccaggggtggagctgatactgtgtggcccacattcctcaatggaaatcacactgttagaaatgatctggtgtggccctaggtccctatgtaaatagagacactcttatcaggcagaacattccaagggcttagagattaccttccaacagcaaggccagaagtcagccctttggggtaaaattaattccttactatagagactttctccctcatctcatttgatggattaagagatattcaaggccgggcgctgtggctcatgcctgtaatcccagcactttgggaggccgaggcaggtggatgacctgaggtcagaagttcgagaccagcatggccaacatggtgaaaccccatctctactaaaaatacaaaaaatagccaagcatggtggtgcatgctgtagtccagctactcaggaggctgaggcaggataatcgcttgaacccaagaggtggagctttcagtgagccgagatcacaccactgcactccagcctgggtgacagagtgagactccatctcaaaaacaaacaaacaaaacataagagatattcaaaggtgatttactttctgaccatgtgactcaacatgattttaccttgtttggggcctaaagccatgttgtgtgctaccacgtcagttcaggagaatacctgacagcttccttgcgcagaatagaggcggtactaactcaaggggggatgagtggggttggccctcggtgttctctcgccactcattctatcttccatggggtcgggatgaaaacgccaatactatgtttcccagatgcgctcaaagatgtggttttgggtgtggattcagctctgcgaattagaggccctcgcagaagacttggaagaccaaaagagaccatctttctgtgccatttgctgtttgctgtgagctcataggatggtgaaagtgttgagtttttttggctgtaccattccagtgtccagtcactagcctcgtaggtactaaaaggcagttatgctcataaaagaatatctaaattggccaggcgtggtggcttatgcttgtattctcagtactttggcaggccaaggcaggcggatcacctgaggtcaggagtttgagaccagccaggccaacatggcaaaactctatctctgctaaaatacaaaaattagccaggcgtggtgtagtcccagctgctcaggaggctgaggcaggagaatcgcttgagcctgggaggcggaggtttcagtgagcagagattgcgccattgtactccagcctgggcaacagagagagactccattttgaaagaaagaaagagagagagagaaagagagaaagaagaaaggaaggaaggaaggaaggaacgaaggaaggaacgaaggaaggaaggaagggaaagggaaatctaaatggccaataagcacatgaaaagatgttcaatatcaacagtcatcagtaaaaataaatgaaaatcacaatgagataccaccacacacccactaggatggctaaaattaaaaagacagacacttccaagtgggaagaggatgtggaacaagtggaatttccattcgtagctggaccagaaagggatacaatcactttagaaaactggcagtttctaggctggccacggtggctcacacctgtaatcccagcactttgggaggctgaagaccatctgaggtcaggagttcgagaccagcctggccaacatggtgaagccccgtctctactaaaaatacaaaaattagctggatgtggtggtgggtgcttgtaatcccagctacccggggggctgaggcaggaaaatcacttgaacccaggagacagaggttgcagtgagccgagatcagaccactgtactccagcctaggcaacagaacgagactcggtctcaaaaaaaaaaaaaagaaaagaaaagaaaattggcagtttcttaaaaaggtaaatgtgcacttaacctatgacccagctattcaactcttaagtatttatccaagagaagtcaaaccacatgtccacacaaagacccacacacaaatgtttacagcaatatctgtaatagtaaaaagactagaaacaaccccaatgtccatcagcacaagtgagtggactacaaactgtggaaggaagaaagactgagctacacaacacatgaatgaatctcaaaagcattgtcttgagtgaaagaaaccacacacgaaagagcacagactgtgtaattccatttatatgaagttctgaaatatgcaaaactgattaacagtgataaaaatcagaagagtagtggcctctactatgtcagcaggaggtggggagagactgcaaaggggcatgaaagaactttctggaaggattgaaatgttctgtgccctgatgacagtggtgcagattacatgtccatatattgatcagaatgatcaaattgtacgtttaagttttgagggctcggtgccgtggctcatgcctgtaatcacaacactttgagaggccaaggcaggtggatcacttgaggttggagttcgagaccagcctggccaacatggtgaaaccccgtctctactaaaaatacaaaaattagccaggcatggtggtgcatgcctgtaatcccagctcctcagaaggctgaagcaggagagtcgcctgaacgtgggaggcggaggttgcagtgagccgagatcgcgccactggactccagcctgggtgatggagcaagaccctgtctcaaaggaaaaaaaaaaaaaagatttgtacactttactatgtgtaagtgatatttggatgtgtgacccctccaaatctcatgttgaaatgtgatccccgatgatggaggggggcctggtgggaggtgattgggtcatgggggttgatccctcatgaatggcttggtgtcctccccatggtcatgcgtgagttcttgccctcttagctcacgtgacagctggttgcttaaagagcctggcacctccccctctctctgtcttactcctgctcttgccatgggacacgcctgctatcccttcacttcctgctatgagtaaaagattcctgaggtctcttcaccaaaagccaagcagatgctggtgctgtgcttgtacagcctgaagaaccatgagccaaagaattctcttttccttataaattactgtctcaagtattcttttatggcaatgcaaaatgaactaacacagtaaattataactcaatacaaaacaagaacattgaaaacaaataggcagttctgtcctgggtggtgatgattttctgatccctggatctcagacagagcagccagatgctgaagctgacgtgtacaatgggggctcctgattagggtggagggagaagctccttgggcaagtcagtctgctcatgttgtggaatcatttgcagtcttcacttagagcgcactccaccagcctttccaaagagcttgtcaacctctaattccttatgccaagccagaccaattttgcttaaaattgacagtcacaaataatctcaaaatctcgtggcttacaacaaaggtttgtttctcgctctcactacatgtccctcacggttcagctaggagctaggatgggacccaagatgatggggaagcctgggctgggcgcagtggctcacacctgtaatcccagcactttgggaggccgaggcaggcagatcgcttgatctcaggagtttgagaccaacctggccaatatggtgaaaccttgtctctacaaaaaatacaaaaattaggccaagtgcagtggcttacacctgtaatcccagcactttgggaggccgaggcaggcggattacctgaggtcaggagtttgagaccagcctggccaacatgtcaaaaccccatctctactaaaaatagaaagattagccaggcatggcggtgcatgcctgtaatcccagctactcaggaggctgaggcaggagaatcacttgaacctgagaggcggaggttgcagtgagccgagatcaagccactgcactccagcctgggtgacagagtgacagagtgacactccgtctcaaaaactaaataaaaataagctgggcatggtggcttgcgcctgtggtcccagctatttgaggggtgaggtggggggatcgcttgagcccaagagatggaggttgcagtgagctgagatcacgccactgcactccagagtgagaccctgtctaaaagaaaagaaaataaaagaaaagaaatgtttctggttatcatagcaggcagaaggcagaacaaggaacaaggtgagacacacactggctcttatagcctctgtcaggaagggacacacctcatttctgctcacattgtcattatcgaaagcaaatcacacgggcacatttgagttcaacagcacagaacattacaatcttcttataggaaggtatattaatccgttttcatgctgctgataaagacatatctgagattgggaaacttacaaaagaaagaactttattggatttacagttccacgtggctggggaggcctcaatcatggcagaaggtgaaaggcacgtctcacatggtggcagacaagagaagagagcttgtgcagggaaactcccctttttaaaaccctcagacctcatgagactcattcaccatcacaagaccagcaagagaaagacctgcccttatgattcaaccaccttccactgggcccctcccacaatatgtgaaaattcaagataagatttgggtgggggcacagccaaaccacatcagaagggaactgggtattgatgggcagtaatattgtttactgcaaaggacatttattatctcacatagcaagagttctagaggcagaaactgtattcagcttcaggagacagccagaaacaacgacttaaacaggttatttattcctctctcacatagcagaactctgaagtacatagtgcaaggctgggaaagaggatccctaatatcataagggaccagacttgctgctctgccaccctaagcatgtggcctgaagcctcaagatcacaaaatagctgcagaagcctcagccatcatgccacattccaggaaaaaaatcaagaaggggaaaaaaaagtgagaaaggaaaggcaccactaggtgattcagctccttttaaagggacttcccaagactccctcccaaagatttctacttccttcggattgctacctctaattgcaaaggacacagaaatgtggtcttttagctgagtccgtgacaccccaaataccatcaaggaaaataattgccctcaggaatttgttgattaggatgctgagaaggatggggagctgccaccaagtcaggagatggagcctcaagtcatttttactccaatgtaaaaggaaaagataactgttaagactgggggttggccaggcacagtggctcacacctgtaatctcaacactttgggaggccaaggcaggtggatcacctgaggtcaggagttcgaaaccagcctggccaacagggtgaaatcccatctctactaaaaatacaaaaattagccaggcatgtgacacatgcctgtaatcccagctactcgggaggctgaggcaagagaatcacttgaacctaggaggcggaggttgcagtgagccaagattgcaccattgcactccagcctgggtgacaagagtgagacgtcatctcaaaaaaaaaaaaaaaactggtcgtttttgaaacttccagaggacagcagcactgattctcagacttgatagagacttccagacatcacttcaacagcgcctccaatgctctccaatgctacccaatccctttctggcaaaagacatctttttctgtggcatcatggtctgaagtgaagcctcctcctcctccacccttacatcaggggagatatcttgccaggagctaatggagtggatgttgtaattcagctagcctcctgagtacaattctgtcaaggttcttgttttgaaattgaggccagatcacattaactggaaggaatctgccttttctcatctgacactagattgtgcttttcttggaggtgttgaggatgacctccaatgattgcttcggtaaagtctgttggcttctcaagaagttattgagtcaaggactccagctgctgatggtgggaggttaaacagggtttgaaacatcgcctgaggtggctttgtaatgtatcaccttggccaggttaaactacacttcccagaatctttttccctagatgcctgtgttttctggttagggtgaaccacaagagacattcttgtcagggatctgctgggtagaggtgaagccacggacatttcgcagcttataccagttgtcacttatcagacagctcatctcattggcataaggcagcaaccagggctgcaactgtttcaccttccgctggatcctccttcagcttccccagttgttgggccagacatgtgtgctcagccccgtgatgaaggaccatgactctagcaagacacccacagcaccaaggtcatagacaacaagaattagcatggggctgggtgcagtggctcatgcctgtaattccagcactctgggaggccgaggcgggtggatcacttgaggtcaggagttcgagaccagcctggtcaacatggtgaaactccatctttactaaaaatacaaaaattacccaggcgtgatgttgcatgcctgcaatcccagctactcgggaggctgaggcaagagaatctcttcaacctgggaagcagaggttgcagtgagcagagatcacaccactgcactccagcctggtcgaccgagtgaaactctgtctcaaaaagaaaaacaaaaagaaagaaagaaagaaaaaaaagaagagaaaagaaaaagaaaaagaattaacataggattcagtccatccttgtggactccagcttgtgcttgtgggttctaacttgttccgtgctctccccaatcttacctcaatcttcccttcctgacttcctgcacctgtgggtttcaagttccagcatcaagacaacagccctacaaagagagcttcactagcaactacaattgttgaaggtcaaattcgtgtagcaaactgtgtgtgtgtacgcccacatatgtattaaaggttcagctttgctgatacagaatttggtactaagagtggttccagaaggccagaatcttaacaatgagatctggtttttctttctcttttttttttttttttgagatggagtctcactctgtcacccaggctggagtgtggtggcgtgatcttggtttactgcaagttccgcctcccgggttcacgccattctcctgcctcagcctccccagcagctgggactacaggcgcctgccacaacgcccagctaattttattgtacttttagtagagacggggtttcaccgtatta[135 bp omitted]gccattaatgaccttgttttcagtaatgaagggtacactgataggtcatagcatggagtggcaaggcagtcactcagaccatcaccagtagcttcctatattaggtttctatagaaggaaaggctctgggtgactgagtatttgcttccacagaacagtttagtgaaaataagaagtgtaatggggttggctcattgctgctgactgtgctggaaaacttggagctgaggtggaatgatggcactcagaactttaccttcccagctctggttctgtataagggacttgaaagcttctgtgagtggtggccctgaaagaaacttgtatttcccatagtcatagggctgagatttctgaaaaccaaagctaaagtctaatccaacaaaagttgaacttctaacctcacagggtcttttttgttaaagttagggctttgattggggaggaatgggatcctgaaaattgggatggagacatatgagcagattccagtgaagctgaggactttaagacccctaaattctgccaaatctctttgcctgcagaggcagccctttcactcttgcctgcagaagtgagtctcctcttccctgaagaaattgtaatggccttccataaggcaaggcatctatgctcctcaggacctattcctatcacttcttacttctaagacctatgactagactcaaggctcaagagaatgtgaaaggtgaggtataaaatgtgacccatgagggggtgcaacacacacccaaataattgtcaatttatatcaacagagaactggggaatatgtgcagaaatggatcttaagggtgtggaatcaaggtggaagacaatatagttggatcaagtcaaatgtatttacattggcccaccaagcagagatgtaatgtttgagcttgaggggctaggaatggttctgacagtttgcttggttggctgattgatatatggacccgtacctgggcctataataggttgaaaatgccagaatttccttgggtgtactaaagagcatgaatcagcatatttttttttctgtaaaaagccatagagtaaatgttttaggttttacaggccagtctcagtttttcactcttcagctctcccattgtagcaataaagccatcaaggacaatttgtaagtaactgagcatggctgtgctccaatataagtttatttataaacactgaaatttgaatttgtatcattttcatgtgtcacaaatattatttttcttttgattttatttcaactaaaaaaatgtaaaaaccaattctattttgtgggccacacgaaaacagcccaggaattagatttgacccatggactgtcatttgacgattcctgctgtagtgaaaggtggccaaaggctcagagagattggaatgctggagtggctttatcatgtaagatttgctcatctatacacattgacagtgccaaggggacacgactttcatcctagctatcagaaataaatttgtgaaggagagtcctagcatccttgaagagctctgtggtggctcttctttgtaggtcagaaactctagtggaggtcattaagatggctgaccagaagtgcccaacactcagctgcgtagagtgtctaagagaaaacactggaattcagcaaagaagtgacaaaaccccagaatattgtgatggcagcatagacagggaagcaaagcacctgagcagtattggtgcagagccaagaggactccccattgcaggtaaaaggtaagtggggggtgccctgcagtccttgcagcaatcctagctataagagggcctcacggtcctcacaggcctgaagcccagtctagggagctgcctagaatccacatggctacactgccccagagaaaggactcacactgaggccccactcccaaagacccaggctgctaccacacagggctattttgagaacagagcccactgctagagggcattctgccttggatgccaatagctcctgcatctccacatccctggggtccttctgttattccaccatgtctacacaaaagggtgcaatgccacaacaccagttagatccagaagtacagctatgaccccagcatttgaactcatacagtgccccacaccccagggaacaggcaatctatcacagcagggtggcagcccccaaaacatggggaaccaatgtgcaaatccctcagggaccaaggacttgcctgcctggtgcccaacagtgatggcaatgctgcctcacaactagcagagccaccatgcccagtgcacacttccctagggttcacccagctccttcctccagcaaagccacaccactgcctccttaaacacctgaatattaggccactgaagtattcacagacactgctgacattaattacagccaaagaaatcacatggagatcatactactgtgtttatctagaaccacagccaaagcatcctacacaaccgacactatagggtacatatacaggaaaaagtctttacttatgaaagttactccatcaaattggaagaggtagctattataccagatgtgtaggaacacaagaaacatgaaaaagcaagaaaacatgacacctctaaaggaacacaataatcctccaataatagaccccaaagaaaagaacatctgtgcaattcccaaaaaagaattcaagtgatcataaggaaatttgatgggata[132 bp omitted]ctggccaacatggcaaaaccatgtctctactaaaaatacaaaaactagccaggcatgatggtgcatgcctatagtcccagctacttgggaggctgaggcagaagaatcgtttgaaccctggaggcggaggttgcagtgagccaaggtcgtgccaccgtactccagcctgggcaacagagtgagacaacatcccccgcccaaaaaaatcaggaaaacagttcatgatcagaatgaaaaaaaatcagtaaagagatggatatcataaaaaaaaacacataaattttggagctgaagacttaataaatgatttttttttttttttttttgaaacagagtcttgctcttgtcacccaggctggagtgcaatggcatgatcttggctcactgcaacctctgcctcccaggttcaagcaattcttctgccccaacctactgagtagctgggattacaggcccctgccaccatgcccagctaatttttgtatttttagtagagacggggtttcgccatgttggccaggctggtctcgaactcctgacctggtgatctgcccacctcagcctcccaaagtgctagaattacaggcgtgagccaccgatcccggccaataaatgaaatttaaaatataattgagagcttcaacaacaaactaggtcaagcagaagaaagaatttctaaacttgaagacaggtctcttttgaaataactcaatcagacaaaaaataaaataaaaaagaatgaaggaagcctacaagacctatgggacattgttaagcaaacagatattccaatttccaaaaggaaaagagatgagaaaagacacagaaatcctatgtaataaagtaatagctgagaacttccaaagtctcgggaaaggtatggacatccagattcaggatgctcaaaagtccccaaatagattcaacccaaaaaggtcctctctgtagcacattctggtcaaactgtcaaaagttgaagaccatgagggaatttgaaaaacagcaagagaaaagcatcaagtcacatataagggaatccccattagactaatagaagacttctcagcagaaaccttatattacaggagcgaatgggatgatatattctaagtgatgaaagaaaaaaacctggcagccaagaatactgtaacagcaaatctatcctttagaaatgaaggagtcataaagtctttcccagacaagcaaaaactgagggaatttattaccactaaagtagccttacaagaaatcctcaaggagtagtaaatcagcaaattatctgaataggcatttctcaaaagaagacatacaaatgaccaacaagtatatatgaaaaatattcaacatcattaatcatctggcaaatgcaaattgatactacaataagatatcatctcactccacttagaatggctgttatcaaagagaaaaaataacaaaagctggcaaggatgcagaggaaaaggaactcttatacactgttggtggaaatgtaaattagtacaatcatactggaaaacagtatggaggctccttaaaaacacctaaaaatagaactatcctatctatgatccagcaatacactctagggtatatattcagaggacaggaaatgagtatgtcaaagagatatctgtacttatatgccaaagataaggtaagcatggttactatagttgatagtgaagtcaaaatagtaataagaataatgtgactcaaagagacctttggcattcactactttatcatggtatgcctcgaaatgaaatagatgggggagcctactaaactcttgcttgatctgtctaggtgggtaagttctgagtctggcagacttgcagcaccattctcaatagccaagatatggaatcaacgtaagtgtttttcaagagatgaatggataaagaaaatgtggtacagatacacaatggaatactattccaccgtaaaaataatgaaatcttgtcatttgtggcaacattaatgagcctgtaagacattatgttaggtgaattaagccaagcatgggaagataaataccacatattctcattcatatgtggaagctaagaaagttgatatcatagaagtagagaatgtaatagtggttactagaggctggataggggttgaaggggataggaagatgttggcaaatggatacacaattacagctagataggaaaaataacttccagcattccttagcactgtaggatgactataattagcaatgatttattgcaccattcctcaggacaatcaaccagtctgctgatggctaattaattacgtcgaactgtctcttttttaattttcttttcttttttgagacagagtctcgctcttgtcacctaggcttgagtgcaatggaacaatctcggctcattgcaacctccacctcccaggttcaagagattctcctgcctcagcctcctgagtagctgggattataggcatccatcaccacacccagctaattttcatatttttagtgaagacagggtttcatcatgttggccaggctggtctcaaactgctgacctcaggtgttccacccatcgcagcctcccaaaatgttgggattacaggtgtgagccactgcgcccagccacattgaactgttcctgtcatggaaagggcaactcttttttcttattttaattttttaatttttgtaatagaattcgcttaccatacaattcacatgccatacagttcacacatttaaagcatacaagccgatctgattatttcacattgcatgcctgtatcaaaacatctcatgttctccataaataaatacacctatgatgtacccacagcaattaaaaatttttaaaaatcatgtacaagtcaatggtttttagtatatccatagatatgtacagccatcatcacgatcaatttaaaaacattttttttttttgagagagagtcttgctctgtcacccaggctggagtgcagtggcatgatcacggctcactgcaaacttggcctcccgggtttacgcctttctcctgcctcagcctcccgagtagctgggactacaggtgcccgccaccacgcccagctaattttttgtatttttagtagagccgggatttcaccatgttagccaggattgtctcgatctcctgacctcgtgatccacctgcctcggcctcccaaagcgctgggattacaggtgtgagccaccgtgcccagaccaattttaaaatatttttatcacccccacaaaagaaacccaatgctccatagctattttcctcctgttcccaaatgtctcagccctaagcaaccactagtctactctctgtctctatatattttcctattttggacatttcatataaatgtattcatataatatgtggtgtcttgtgattggcttctttcactgaatgtaatgtcttcaaggttcatccgcatcatagcatgtatcagtactatgttcctttctatggctgaataatatttcattgtgtggatttaccacatattggggttttttttgtttttttttttacagaccccgcccccccaaatattgtttatgcctccatcagtttgtagatatttggttttgttttcaccttttggctattatgaataatatgaaaataaacttatgtatttgttattatgtggacataagttttcatttctcttaggaataaaattgctgggtcaaatggtgactgcatttttaacagtttgaggaactactggactgttttccatagtggctgcagtgatgaggtgtggtggctcacgcctgtgatcccagcattttgggaggccgaggggggcagatcatctaaggtcaggagtacgagaccagcctggccaacatggcgaaaccccgtctctactaaaaatacaaaaattagcctggcgtgctggcaggcacctctaatcccaactactcgggaacctgaggcaagataatccccttgaacctgggaggcagaggttgcagtgaaccgagatcacactgctgcattccagcctgggcaacagagggagactctgtctcaaaagaaaaaaaaagttttgttgaactaactcatgaagccatctggtttaagacttttctgtgtccattaaaatgatcatgtggttttgtaatttattctgttgatatggtgtattacactaattttcagatgtgaagccactgttacattcctggaataagtcccacttggtcgtggtctataacactttttatatgtctctggatttagtttgctagtattgtgttaaggatatttgcatttatatttataagagatatttgtctgtagttttcttgtgtctttctctggtttttgtactggggtaatactggtcccaaataatccactggaaagcgttgcctcctttttttaatttttgcaagagtttgagaagaattggtattagctcttctttaaatttttagaaaaatctgccagtgaagctatctggttcttggtgtgtgtgtgtgtgtgtgtgtgtgtgtgtgtgtgtatgtgtgtgtgtgtctttggtcattaattcaatctctttacttattagaggactattcaaattgtctgatttctcttgaatcagtttcagtagtatatgtcttctaataatttatttcaactgggcgcagtggctcacgccagtcccaacactttgaaaggccaaggcaggtggatcacttgaggtcaggagttcgagaccagcctggccaacatggtgaaaccccatttctgctaaaaatacaaaaattagccaggcatggtggtgggtacctgtaatcccagctactttggaggctgagcaggataatcgcttgaatccgggaggctgaggttgcagtgagccaaaatcacaccactgcactccatcctgggcgacagagcaagacttcatc[131 bp omitted]agcctggccaacatagtgaaaccctgtctctactaaaaatacaaaaaaattagccaagagtggtggcgggcgcctgtagtcccagctatttgggaggctgaggcaggagaatcgcttgaacccaggaggtggagattgcagatcgccaccatgcctggctaatttttgtatttttagtagagacagggtttcgccatgttggccaggctggtctcgaactcctgacctcaggtgatcctctcacctgaacctcccaaagttctatgattacaggcatgagccactgtgcccagccgcatgattttgattttaattttaaaatcaaaattttatacagatttgttttgttgcctagtgcaggttctatcctacagaatattctccgtgcagtcgagaagattgtgtattctgcttttgttgggagaagtgtgctatagttgtctgttatatctggttgattaatactgttcagatcttccattttcttgttgattttatgcctagttgttctatccattattggaagtgaggtactgaagtctccaactattattgtggatttgttcatttctctattcatttttattagtttttgctttatgtattttggtgctttattattagatgtatatgtgtttatattgttatatattctgatggactgaccgccttatcattatacaatgcttctctttatctgtaataacttttttgttacaaagcttattttttctgacgttagtattgccactccagctttcttgtagtcactgcatgatatattgatatattgtctttcatcattttactttacatttttgaatcttacatgtttttcctatagatagcttttggctgtatcttggtttttaaaaaaaatctagtctgaaatatttgacttttaattgaattgttcatttcatcaacatttaatgttattatttatacaattggatttacatctgccatattagcttgtgtttcctacaaaatttctttattagtgccaggggttttttgttttatttattgattgattttatatttattgagattttctacataaacaatcatttcaactggggatgggaacagttttattttttccttcccaatctatatgcctcttacttccatttcttgacttattacactggctaagactttcaatatgatgttgaatagaaatggtgaacatgcttgtcttgttcccaatcttaagaaagaaagcattcatttttcactgtttggtatgatattagctgtaggctttttgatgctctttatcaggttgatgaagttctcttctattcctagtttgctaggattattttttgcaaaacaaaacaaaacatgtatgagtgttttattttgtcaatactttgtctgcacctattgatataatcatgatttttcttctttagatggttaatatggtaatagtgattgattttaaaaaattggaccattgttgcattcttagtataaatcccatttggtcatagtttattgtatttattcatttattattattattattttgagacagagtttcactcttgttgcccaggctggagtgcaatggcaggatctcggctcaccccaacctctgcctcctgggttcaagtgattctcctgcctcatcctcctaagtagctgggattacaggctgtgcaccaccatgcctggctaattttgtatttttagtagagatgagttttctccatgttggtcagtctggtcttgaactcctgatctcaggtgatccgcccacctcagactcccaaagtgctgggattacaggtgtgagccaccgcgcccggccggtcatagtttactactcattttacatattgccgagttcaatttgctaacattttattgagtatttttgcatctatattcatgaggagtattttagttgtgtttattattattttttgtactgtctatctggtttgtcatcagggtaatgctggcttcataacatgagttggagagtatttctccttttgtattttctggaagaaattatgaagaattagtgctatttcttctttaaattacttatttaaaaccattgaaaccacctgggccaggagattttttaaaatggcattaactatacatgcaatttatttaatagttactagactattcatattatctatttcaacagtggtgaatgtagtagctggtagtttttgagaaattggtccatttcatctaaattttgatatttatgtgtatagagttattactgatattcctttataagctttttaataattatagggtctgtggtgatagctgtcctctttctaccctaatattgataatccctcccttctctctcttctctctttatctctacctctatctctttctctcccttcttctctcctcagtcttgttagaggtttatcaattttactgatcttttcaaagaaacagcttttggttttactgatttcttctattgcttttttgttttcattgatttttgcacttattttttccttgctcttcatttgggtttattttgctcttcattttctaatttcctatggtgaaaacttagattattgacttgagatctttcttcttttctaatataatcaacatttaagactatacatttttatataagcacttctttaacagaattccacaaattttgataggtttcttactttctttcagctacaaatatttcctaattccctttggaatgtcctatttttcaaatgattaaagattgtcctgttatcttcctgttattgatttctagtttaatgctggccaggtatggtggctcatgcctgttatctcagcactttgggatgccagagcaggaggatcacttgaggcaaggagttcaagaccaacctgggcaacatagcaagacctcatctctacaaaaaatttcacgtgagcccagaagtttgaggtttcagtgagctatgattgtgctattgcactccagcctgggtgacagagtgagactatgtctcaaaaaaaaaaaagttctaaacggtcaaagaacatacttcatatgatttcaaattttttcaactttttaacttctgtttcatgactcacaattccatttgtcacggtgagtgttccatgtgcatgtaaaaaggctgcttattctgctattttggggggagatgttccataaatattgattaaagccatttggttgatgggtaagttctatgtctgtgatgtataacttctatatccttaattttctctctactaattatatttattactgagaggggaatgttggtctctaactacagttgtagaattatttattctctttcctgtcttgtcagttttcactttgtgtgttgttttttttttccaggaaagaaaaataaaatggtttttaataccatatatggatatttcattcttgggaatggtgctgtgcaattactgtgcatgaaatcagattattcaagaaagctggtttttaaatactagtgtaattgccccaaaaaaggcccaacaagacctgcagcctgtttcatgcatgcaacatttaatctaacagcttcatcagccctctctctgcttgtcacggctttgcgtattttgaagctctgttaggttaatacatcataattgacccttttatcaatatgaaatgcttctctttactcctggtaatttttttctctgaactttaatttgtctgatataaatataacaactccagctttcttttgattaattttacaggtatatcttttttcactcttttacttttaatctacaaatttccttaaatttaaagagtttcttgttgagagcatatagttaagtgaattttttaatctattctcataatctcttttaattcatatatttagaccatttacatttaatgtaataattgatatgtttgggttgggtataccattttatcatgtgttttctatttgtttcatttattttttattttattttttttctgagatggagtcttgctctgttttccaggctggagtgcagtggcatgatctcagctcactgcaacctccgcctcctgggtttaagcaattctcctgcctcagcctcctgagtagctgggattacagacacccaccaccacaccctgctaatttttgtatttttagtagagatgaggtttcaccatgttagccaggctggtctcgaactcctgacctcatgatctgcctgcctcagccccccaaagtgctaggattacaggtatgaaccactgtgcccagcctattttgtttttgttcctctctttttcctttcctgacattttttttgcttatttgaacatagtttagtcttccattttaagttatcaattatgatttttactataactatttgtataagttttagtggtaactctagggattacaaaatgcacactgaactttttacactgtatttagaaacaatattttatcactcaaaactttagcactagtaggtctcttaattctcccccttatgttatacttgtcatgtattacatacacattcatgaaaattccatggccaatgttatagttttttttttttccaactgtaaaacagattttaaggaactcaagaggagaatagcctattatatttacccaggtagttattacttctgttgttcctcctttattcctgatgttccaagtttccttccggtatcatttcccttctgtctgaagcaattcctttagcaatgttttttacagcatttccgctgggtatgaattttcttagttttacttaatctaagaatgtctttatttcgcctttattcctgaaagttattttcactggagatagaattccagattgacacttattttctttcagcactttaagaatattaggccatttccttctggcttccatggtttctgctgagaaatatgccatcatttgaattattcacatgtattggcttgttgggttttttttcttttctttttttttttttttttcttctttcaagatattttcttcatatttaatttttagcagtttaattatgatttgtctgtgcatggatttctgtgggtttatcctatttggggttcacttagctccttgaatctgcaggtttaagtctgtatatagggaaaacaaactgtttttcctcttctatactcaccctcagcactcaacacttctgatgccagatgtgtggggttccttccccccccaaacaagcaattctcctatggcagttgggagtcctacaattcaattcagttctaacactatttacctagagacagtgtcagatcccaaaagttaagggctcagtcccgtaagactgcatcccacttcagatgtcaatcataagtgatagattcccaggttatccacaacttctgtctgacttggctacaaattacaggttcacaagatcctttacttgggttcagtcatttgctagaatggctcacagaacccactctgtatgctgaaactgagaattaacttgattaagcccactgaacttaaactgccttacttacttttaattccttacttctagttaatcttaataactatatagctaaaagtcatgtaactaagcaatctactatcttccttatagataatatctctgatgtataggtcaccatggtaacagttgcttaaagttatttttcatgaatttggggtcagctcttgtccagttcaagccgcttgagaccacttcacctgggcctgcgtgaatgtccaagaggtgagcttctgacaccagagggccataaagatcttcctacagatcatactaacgccaccattttctaaacatgcttcctatgaagagccatgaggcttgactatgtgtgtgcagattgccaattacctcactttttcttatcccaattccctttctccacacctcagaccactctgcttctttatctcataaatatccctaaatcccatctttggggaggcagatttgagacccattcacccacctcctcacttggctgtctcatgaacaaaccctttattttttgcaaaacctttcgccacagtgattggcttattgagtgcaggcaaaatgaaccttgctcagtatcagtatttacccacttgttacaaagaatccaaatcaggaacagccggatggaagatgcatagggcaagatatgagggaaggggtgcagagcttcatgtcctgtccagctgtacctgcctcctagcatttccacttgttcagcaacccagaagctctcagaaccctatctgttagggttttggtggaaagcttcattacataggcatgattgattgcatcgttggcctttggtgatgaactctaccttcactccccgtcccgctccccagagatggaggtggggtgtggctagaagttctagcccactcatcacgtgtttggttctctgggcaaggagacctcattctgaagctgtcctggatcccccaaccatcagtcatctcattagcatacaaaaatatttcagttgttttaggagcagtgtgtcaggaagtgggggaaggcatagaccaaaatttatttcttggccgggtgcggtggctcatgcctgtaatcccagcagtttgggaggccgaggcggatggatcatttgaggtcaggagttggagaccagcctggccaacatggtgaaaccccgtctctactaaaaatacaaaaattagccaggcatggtggcgcatgcctgtaatcccagctactcgggaggctaagacagtagaatcgctggaacccaggaggcagaggtttcagtggcaccactgcactccagcctgggcgacagagctagactctctcaaaaaaaaaaaaaaaaaaattacttcttattatgtcacaatggcttttgctaaacttgagatgttttctgtcattatttcttcaaaatatttttcagcaccgcactttcctctggcctctgggatacaaatgttagacctttgtggttgtcccacaggttcctaaggcactgttcaatttttttttttaagtcttttttctttctactatacagatttggttatttttattgttgtatctttatgttgactgactctcttctcccatctccattttgttattgagcccattcgatgaatattttattttggttatagtgtttttcagttgcacaatttccatttgtttcttcttcatgtgttttatttccttgctgatatctttaatatttgttttaagagtttttttatataattgcaaagtttacatcattgcaatagcatgaattgattgtcttttcccatgagagttaagaattttggtatcctttgtatgccaagtaattttggactgcatcctgcacattttgaacattatattatgacactctgagtcttgtttaaatcctattgagaatattgatggttttgttttagtggccagttaacctgggtaaattcagactgctaagttcctacttgccttctatgccctgtagttccaatgtcagttcagtttttgaagcatttgcaatgctattctgatctatcttccaaatgtgtcatccagtggtcagtctgggccctgggcagaagtctaatcattagctcagtttccagtctgcggcatgctaattagggccagatgagtccatgagttcataaataactttatggggtgactttctcaagcccttccctctctgttatcttccgatactttctggttccctgggctcccctttctgatcctccagacagaaactgcccaatttcatgattgtgccaggtctaggatcaagaggttggagaacagagagggagaaaaaaaagcaatggagtctgatcctttccactgaatggagagaaaagtcctttcctgaatttttggcttctgccagctgctctgctactgcaatgggattgctcgaaagaaaacagaaaagggggagaaaataaattctccccactctctctgaactttaggagtaccctttcctgctccttcagccaggcctctcctaggtttctccctgtctgcaccacagtgctcatttccaagttttggactgtattgagttcaggtcaggggatacaggaggaaaataatatagtaaactcatcattgatttggtggcactttgaatttttgtgttcctttcccaatgcaactgttgtaactgactttccaaaattgtcaaatagctgggccatgtattctgtctggattttctagttgtgttcagtggaaaagaaagtgtagcacgtgtttactccttcttgcctgggtttactacttctttcccagaactggaacttgaaatggacttttgaagatttggtttcagtgtcatctgtcttagtctattcaggctgctctagcaaaaataccataaactgggtggcttaaacactggaaatttattgctcacagttctggaggctggtaagtccaagattaaggtaccagaagattcggtgtctggtgagggcttactctccggttcataaacagtcccttctcactgtgtcttcacatggtagaaggagcaaagtatctctcttgagtcttcttcacaacagcactaatctcattcatgagggatcttccctcatgacctaatcatcctcccaaaggctccacctcctaatactatcacctcagggattagaatttcaacatatgaggccgggtgcagtgactcacacctgtaatgccagtactttgggaggccgaggcaggcagatcacttgaggtaaggagttcgagaccagcctggccaacgtggtgaaaccctgtctctactaaaatacaaaaattagctgggtgtggtggtgcgcacctgtagtcccagctactcaggaggctgaggtgggaggatcgcttgaactcaggaggtggaggttgcagtgagctgagatcatgccaccacactctgggtgacagagcgaggctctgaaaaaaaaaaattcaacatatgaatttggcagggaggacacagacattcagatcatagcataatctatatggcaacacctgtggggctggagcaatgtcctctaggatgtggtatgtgccctaaatcaatgactaatatatggtgctgtctttccccaggcaggattcatgggttcccaacacaaagggatgaaaataggattggattttctcattatttcccctagtgatccactatcaaaatttttgctacctcccacaactctaggttcttctggtctagaggtcctatttccaaagggagtgatgcttccaccagcagacacaacaatgattccagtgaactggaagttgagactgccccctggctactttgggctcctcatgccactgaatcaacaggccacaggggaggtcactgtactggccaaggcaattaattctgagtatcaaagggaaattgagtataaagagtatgtctggaatacagaatatggtctagggtgtctcttagtactatcatgtcttgtgattgaagtcaatggaaaactactgcaactcaattgagacagggctgctaatggctcaggtccttccgaagtgagggtttaggtcaccctaccaggcaaagatccaaccagatgaggtagttgctgagggcaaagcgaatatggaataggtaatgggaaaggtaactgtaaacataattataaatgccagccatgattatgtgtccagaaataaaaaactgtagtagtgtaaaccaaaactaaaatcctaaaccccccaaacaactgaacacaccccctcttggctgagggggatcacagagaaacctgaaacactgaattcccggccatgacaggaagggaggtcagacgtgcctcatttcagcccctccattttgagaagttaggcacaactgaccagcattaatattaaaatggggccagatatatgtgttttgccccatgataaaggaccctggctccaccaggatacccacaccaccaaggttggaggcaacaagaactgaaatggggctgggcgcagtggctcatgcctgtaatcccagcactttgggagtccaaggtgggaggatcacttgaagccaggaatttgagaccagcctgggaaacacagcaagaccccatttctacaaaaaattttgaaaaattagccaggtgtggttgtgcacacctggcatcccagctgtttgggaggctgaggcaggaggattgcttgagctcgggaggtcaaggctacggtgagctatgatcatgccactgcactccagtgtaggtgacagactgtaatcctgtctcaaaaatataaaaaataaaataaataaaatttacaaaagaactcacatggggtttggtttgtccttgtggactccggcttatgcatgttggttccatcttgttctttgctctccccaacctttcctccatcttcccttcctgacttcctgcacctatggggttcagttccagcatctgactcaaagataacaacctgacagagaccatttagccagctccctaaattgcataagatcaaatccagtaacaagtccttttgtagcagctaatcagtctataggtatatcttagtggtgcttcagccccccacctgtgattcaatcctgactgatccaggcaccaaattctagccacttcacaaccagagcctggaatatgtgtatgaccccttaagaataggagagctggctggaggagagcttctgttattatctgactgaagtctcaattaaaaaaagaaatgcaaggatggaatttcacaggaaagtagaagaaccccagacaggagggctgcaaagagaaggctgttggagggaggctgagaagagaaaaagggagcaggagagagtagcttgcacttcagacacctccttttccaagcctagggggggcaagaaaggtgggtaaagtcacatccttgagccctccaagaagagatctgcatgactataggcgacatatgttgctgcaccctgcttagctaccattttctcctctttgggtcacagcactcctgttttcctttagggcgcacttctacccatgttcagcccctatgatttaagtaagatgcgatcccctctccaagctctagaaatggacatatgtcccaggcctgggaaatgggaatctatgtaaccctggtgactgttcttggttctgggacagattcatggtcacactgaactgagacccaattctaggacgtttgctgatcctctgtctgggttgctcagatggtagaatgtgaacctggagctgctggtggccactgtttcccccagaagggaggagtcagtttgagaatgaggtcaacacagaggcacattgaactggcagaagggacagggagacactcctcatgtcatcctttgagcacctggatacaactatgtctgaagctaaatatagctggactttttagttatgtgtaccattaagttccatctttgtcattgttattgttgtctttctaattaagtcaatttgaaatcggggttctggcactagcaacagagtaaaaactaataaactgacctttcagtaaaagaatttgttaacgcccatctcatatctcaggtgtgtttgatttgggggaagagcagggaggctggaaatactattaccgatggtagctaactttgtcgaggacttactatgcaccagatgctcttcaaacactatacacattgtaccttataatcctcaaaacaaccctatgaggtggctactaaaattgccccccgttttatttatttattttttgagacagagtctcactcttgtcgcccaggctggactgcagtggtgcgatcttggctctttgcaacctctgcctcccgggttcaagtgattctccttcctcagcctcctgagtagctgggattataggcacccgccaccatgcccggctaattttgtatttttagtagagacgggatttcaccatgttggccaggctagtctcaaactcctgacctcaagtgatctgcccgcctcggcctcccaaagtgctgggattacaggtgtgagcctccgtgcccagctgcccccagttttagatgatcagtttagtttagatcagagagcttaggcagccacctcaaggttatacaacaagcaagaagcattgttaggaagggagtgtccaccgcttcctgacaatagtggctgagatgacttcccgggcatgggaatgggagagggagacattgaatcccccaatttggacccgtccaggttatctaagcacaacctcttgcaatgctgaatgggaggggtcctgcctctggctagtcaggaaagaccttctttattttgggctagaagtgccccctcataattgccacctaacagtcctcctgccctctgtggtcacaggtaagtggagctctgtttctctcactgtaagactagcagatgctagaagcagctgtgccctttcaccgccaacccctggtttcttcgattgttacttggaggctttcctggctgccctcaaagtatcttcttggtgtgggctgattagctcccaccttaattacctcctgacatcacctcaaagctcactttaggctgaagaaaaactataaagtaaatgcttcttattttactgccagtgaaatgatgagcttttcagtgctgtggatttttttttttcttatcatgttcacgtctgacctttcagaggctgacttctaaaatgcaggttagcaaaagtcatgtcaggaggagatggagatgtctcctctcctctgcatctgtgaagaggacagtgagtgcaatctgcaccataaatctagtttgcagaatccgataggacgaggtgtaaaagagggcatggcaatgcgggagtagctttgtgagaattgctctttgcataaaaaccagaggcctcgtgctgcctcagatcccgcgtggccgggatgctcacatctgcagcctggtatctccatctctcactctgctgctacatcctctccactccagctatgctgtgcagactcaccatcctctctcagcactggtcttttgtacacactattccttctcattgaaatactgttccccgcattctttgtctagttaaatcccctcatcctttaagtctctgctcaaacttcgtgtccttggagaagccttgttcgaattccttctgttatcttctctcatgaattcctatacttctccttcatagcaggtgtatagaacatagcacacataaggcacgtgtttatatgtgtttttgtggttgagtaaagtgtgcccccgtccttttaggacagcctgtgccagggcagggaccaggtcttggtcactgctgactagcagtgtgctcataaaggtttgacaacccttgtaggggctgggggatgctgacttatagagttgctgattccgtagtataaatcttccaccacgactgatttcaagctaccaatgtgagttcaaccataactcctgaaaaacttaacaaagggctcttgtgagttgggataaactggcttcagcacataatatggtttggctgtgtccccacctaaatctcatcttgaattgtagttcccataatccccatgtgtcagggggaggaacgcagtgggaggtaactgaatcatggaggaggttaccctcatgctgttctcatgatagcgagtgtgttctcatgagatttgatggttttataaggggcttttccccctttggctcagcacttctctctcttgcaccaggtgaagaagaacatgtttgctttcccttccaccatgattgtaagtttcctgaggtctccctagccatgctgaactgtgagtcaattaaacctcttttctttataaattacccagtctccggtacgtctttttttttttttttttttttttgagagagagtctcgctctgttgcccaggctggaatgcagtggcgcaatctcagctcactgcaagctccgcctcccaggttcatgccattctccttcctcagcctcccgagtagctgggactacaggcatccgccaccatgcccgtctaattttttgtatttttagtagagacagggtttcacaatgttagccaggatggtctcggtctcctgatctcatgatcttcccgcctcggcctccccgaggattacaggcgtgagccactgcacccagccttcaggtatgtctttattagcagtgtgagaacagattaatacagcacgccactgctgctgaccctccaacacctggtacagatttgtggaatgaatgaatgaagttaggcccagaaagcagagcctcctctgcctgtgcctatccatggtatactctccatctgtctgctgtagaaattagctttaagcaaaagtacagcattttctatcaagtaaaatacattcagtgtaatgcaaaggaatattctatgagtaaaactttcccattttcccctggtgttaaaacatactttctagtgtgtaattagagctttgcatgctgtgagtagtgactcgttagtggttcatgagatcaatttagaaggtcctaaccagcaatttttttctgaaatggaattaagtagaagaaaaaagaaatttcagagtatcagagtttgtctccagccttaagtaagtgttactttggtaaactcttattgtgagtgtgtattgttgacagaaaagccaaactttgtgaaatatttaaagaggtttattctgagcctataagagtggccatggcctggggtacagtctcaagagatcctgagaacatgtgcctgagggggtcaggttacagtttggttttatacattttagggagacaggagttacaggcaaagacataaatcaatacacggaaggtgtacattggttcagcctaaagaggtgggatatcttgagtcagagggtggggaacagggcttacaggcggattcaaagactttctgattgccatttggttggaagagttaagctttgcctaaagactgaagaagtccttagaaaagaatgcttgagctaacataaggggttgtagaagacaaggcccttgttatgcagatgaagtctcctaagtggcagcgctcagagaacatgtgaccagggtcagcttggaatttgggatctgattgccataaagagtctactctgtcagtcctgtgatctgtattttaatgttaatgttggtcagttgggcctaaactccagaagggaggggctagaatgaggcatgtgcacctcccatttcttcatggctagaattcagttgttcagatgtctctggggtccctttggcccagaagggggtccacttagttagttggggggctcaggattttatttttggttcaaagtatatattctaggttgtgatgtcaaatgactctcttacagttaacaacaaaagtgtgaaagctactgtggttgatagcaatatcctttggtttagtagctttgttttattttccatgttattacttggaaattcttttcccctggaccctcctaagtctctgtctcctatcccccagagacctaaagggtgaagacactgagcttccagatttgagggcaggagagtcctagtgaggcctggcttggaggccagggaacttcctattccagtctgcaatgttacccttcaatctccagctcccctggctgttggtgcccaccccagagttgtggaagccctttcagtctagctgccccacttggtgacagcatgggcagggcaggacagggagcatcatggggttcatgctttctgccgtccagcctccctacatgcagggcgatggcccctagctgacccttgagagctgaggggaggctaggaagagggttaaaggcgaagccagacccaggccattactgaagtcacatggcctgccaggaaacccctgtctatattgtagctggttgaactaattatattataaatacttttccattttctgcctagaaccatgctctagacatctgcatgaggtcattaaacctgcaccacagccatgcacacacacgtgtgtgtgtgtgtgtgtgtgtaaaagacagacatgaggtatagaagagcaatatagaggtctccatattatgggggaacagacagtcccagagcagggaggtcacttgaacagggtcacagaggcaggaggccacgaacctggctggacactgcagggccaagcaggtaaacactgtgcctgactcgcacccagacttcgcaacaaccctagaatattcataagtcagtaataatagtgttacaggaaaggagtcccgatccagaccccaagagagggttcttggattcccacaagagagaattcagggcaggtccataaagtgaaagcaagtttattaggaaaataaaggaataaagaatggctactccatagacagagcagccccgaggactgctggttgcccatttttatggttatttcttgatgatatgctacacaaggggtggattattcatttctcccctttttagaccatagagggtaacttcccgacatcgccatggtatttgtaaactgtcatggcgctggtgggagtgtagcagtgaggacgaccagaggtcactctcgtggccatcttggttttgatgggtattatctggcttctttattgcatcctgttttatcagcaaggtctttatgacctgcatcttgtgttgacctcctatctcaccctgtgactcagaatgccttaaccatctggggatgcagcccagtaagtctcagcctcattttacctggcccctactcaagatggggttgctctggttcaaacgcctctgacagggtgacaactgtgaccacaacagattcacaaacatgacattttcagagagaggaaggtatgcagggtggtgtgatttggaagaggctgtgggcgtagagggatgggtaattcagttggggtggtcagggagggctgcttggtggaggggactcttggctgagacctgagggctgtgaagttcttagagaagggtgttccaggcagagggaacagcaagcacaaaggcctgagacgagagctagcttggtatgcaagaggaacagaaaagaggaagtgagagtaaggcgggggagggaaggggcagggaatggaggctgtggagaggggagggtttccaggcagcccaggaccctcaaggagagaaacgttggatgtagtctcccaggtagggtccatctggcccttcctcctggctcctgcggagtccgagtggctctttccctccttccctcctctcccctcctccttctctccctctccattttccctgcaaggtctgcagcccaactccagctctcccattactacaggggctggtgggtccttctgagcaagaagatggggctctttgtctacagtgtctgtctatagtcattcacccactcattcatttaatcattcactcattcattcattcatttagccactcatttgtcaaatattgatttttctcaggtgttttgccctcacaggtcctgccgcctaaaacactgacttcttatctctcaaggctttgctttcaacactgtctcttccaagacctctccctgaccactcccaacttactaaacccctatcaccctgttagcttttgaatgctcttcatggtaaaacaggacaggttgatgctctccggggctctctctacacacaagagagagattagcctgacgggcattcgtttacccttctcattttctttgggaaccagcctcccctgctcttagtctatgtgattcggacacagccaactacatttcccagatccagaaatgaacacgccattccaagtaaagccaatgagagacagctgcaggacttttgctggaactattgggaaagtggtgtttctttttctgctatggttacttatctgctatgctctaagcctggaactgctggaggtcatctttgctgcatgaaaatgaagtcaatattgaggacagcagaggtgagagggagagaggcataatcctgagtgtattgcaggggcacctggatccagccatacctgaaatccgagactttccattctaagaaccaatacattctctttgtacttaagctagtttgggttttaatcacttgtgccagaaggcctgattgataataaaacctcaaagataagcaggcagtcaagcttaggtactttccttttaagagatgcgggcaggtgcttccttctctcagaaaccactcctcctctaggaccttctattctaagaagcctgggtgtttgaggttcgttcatcctgaggcataaaaacaagatcaaagtgccaggccagacggaggcagagtgtctacagaagcagccgtgcaactagcagcaggaattgggaatctgcattattaataagcaagcccattttcctttacttctttgtaagcagagccttaattttattagcctgtttattagctctgaccatgtgttcagaaaaagtaccctcagcctctgagtgatctaagccaggcatagttctcctgtcttcttgttggtgattggttctggaaaaggctgggacacactcctggccaaggagaagtcacagcagtgactgacttggagggggagtctgctgggggctggctagtggaaggcatctggggtaaaatgtttttgctcttaaaaagtactgtaggaggccaggcatgttgactcaggcctgtaatcccagcactttgggaggccaagatgggcagatcacttgaggtcaggagttcgagaccagcctggacaacatgatgaaaccccatttctatttttaaaaatacaaaaattagctgggcatggtggtgtgcacctgtagtcccagctactcaggaagctgaggcaggagaatcacttgaacctgggaggcggaggttgcagtgagtggacattgcaccactacactccagcctgggtgacagagtgagacttcatctcaaaagaaaaagaaaagtactgtaggaggccaggtgtggtggctcacacctgtaatcccagcattttgggaggccaaggcaggaggatcgcttgagcccaggagttcgagaccagcctgagcaacatagcaagaccccatctccaaaaaaattttaaaaagatacacaaaatttgccaggcgtggcggtgtgtgcctgtattcctggctactaaggaagctgaggagggagaatcacctgaacctgggagatcaaggctgcagtgagtcataatcacaccactgcactccagcctgtgtgacacagcgagatcctatctcaaaaaaagaaaaaaataataatgtaagagaaataaactttttcttttcctcgcagagagaatgtggcagtgtgaggaggcatttgctggcttaagctgggctctcaaactcttagtctagagcagagttctaacagcatcacgtgtttttgctttctctttcatccacgttgaagaagagggggtagtaaaaatattcctctggtttaacaaaaaattcacaaatatttatccttttcagaatctacatgcaatttaagtattagtcccagaatcacagatgctggaatgttaaagtttctttgacaagacatactgatgatctctgaagtccctgcggcctgcaaagaatatttgcaaacagagttttatgatgctgaggatgattctgaagccacagagaaagacatcatttttcttcttttctttctgcaatttctttcattagcacttcggagcacctatagtcgccatgagttgaaatctcatgagttagtagtaagagcagaatcagagaggctaaacactgaaaatacagaaaggaaatgggtagagtaggattttagcaagaggaagtatacggttgtgatgctttgcacctataggaaatgatggctggggctgtggcagccacgttaccaccgtgagggatgacattgcccacatgctgaggagcctgagtctataagaacatcattcaactgatgcattgacccctggagaacctccccgcctttgggggaccagcagttctgtaaaataatacgtgtccttattgctttttttttttgagatggagtctggctctgtcccccaggcgggagtgcagtggcgcgatctcggctcactgcaagatccacctcctgagttcacgccattctcctgcctcagcctcccgagtagctgggactacaggcgaccgccaccatgcctagttatttttttggatttttagtagagacggggtttcaccgtgttagccaggatgatctcaatctcctgagttcacgccattctcctgcctcagcctcccgagtagctgggactacaggcgaccgccaccatgcctagttatttttttggatttttagtagagacggggtttcaccgtgttagccaggatgatctcaatctcctgacctcgcgatctgcctgcctcggcctcccaaagtgctgggattacaggcacgagccactgtgcctggcatccttattgttttaagatgtttggaatttattcttctcttacttgcagccaacagcatcctacatgaggcagccagggtaagtggtccacatacaatgggtgaacaagtgcttatccaggaattgaaagagcctggctcattcagtgctaggaccagagccctcagtggacattgtcccacctttcagcactgaggatgcctcctcccctccaagccagtcattgctgtatgtgatcatgttaattaggtatccatattccacaggagggagcaacgaggttttcttttttttttttaagatggagtcttgctctgttgcccaggctggagtaaagtggtgccatctcagctcactacaacctcctggttccagcaattctcctgcctcagcctcccaggtagttaagattacaggtgcccactaccacattgggctaagttttgtatttttagtagagatggggtttcactatgttggccaggctggtctcaaactcctgacctcaagctatccgcccaccttggcctcccaaagtgctgggattacaggcatgagccaccacgcctggccgcaatgaggtatttttttgtttttttgtttttgtttttgttttttttcaattctagccgccaatcacaaaatttaactaaggtccctcccagcacacacctgtcatccatcctgaaaatttaaagtaaaggtataaaaatatcaaaaccatgattgcctttggggatggagtggaggtggggattatctgggaaggggcataaggggattttgcaggggtcacggagatgttctttatcttaacaggggcttgtagtctaaagcagaagcgtatacttattacataagtgcattcattggtcaaaactcagcaaatggagatgggaacagtggctcatgcctgtaatctcagctactgaggaggctgatgcatggggatcacttgaggccaggaggtcaagaccagtctgtgcaacacagaaagaccttatctcttttaaaaaaaaaattgttttaattccccaggcatagaactcaccctgtggagaaaaaaaaaaaaaattagccaggcgtggtggcatatttctgtagtaccagttactttcaaggctgaggcagaaggatcgcttgagcccaggaggtcaaggctgcagtaaactatgatcacaccactgcactccagtctggggtacagagtgggagcgcatctctaaataataatgacaatactaagaaattcagcaaatggatgtttcatatgtgtgcatttcattgcatgcaaatttataaaatctcaaagataactgcaaacattgaactccagttggtgatatgaatcctgaaatgtttaagggtaaagagtactgatgtctgctttaaaattctttaaccttctttaaaaatacatttttaaaaaatcagatgacttgatagaggaatggactgatagatatgtaataaagt[136 bp omitted]tggccaacatggtgaaacaccatctctaccaaaaatacaaaaattagccaggcgtgacagcgcatgcttgtaatcccagctactcaggagaatcacttgaacccgggaggcagaggttgcagtgatctgagatcatatcactgcactccagcccgggtgacagagtgagactccgtgtcaaaaaataaaataaaataaaataaaataaaataaaagtgatgatgatcatagttatgaacaacagtgagagttcacacactgcctgtactgtgggcaaagcccgttctcagtgcttcgtgtgaatgaatttgttcactcctcactacaaccttctgagatagatactgttattctcattcacagatgtggaccctgagaccagggaggttgcgtggcatcattacatcagaaggggagtggtctgaatccactcctccccttccagggcaggaagtcaacagagaagggctctgtggtaacgttgacaatcacaaatcagtggcataaacatctccttaagacatgcagaggcagctgggcgtggtggcccacgcctgtaatcccaccatgtgggaggccaacgtgggaggatcacttgaggttaggagtttgagaccagcctgggccacatagtgagaccct[131 bp omitted]gtgaaatcctgtctttattaaaaatacaaaaattaaccaggcatggtggcaggtacctgtaatcccagttactcaggaagctgagacaggagaatcgcttgaaccatgggagacagagattgcagtgagccgagatcgcgccagtgcactccagcctggacgacaagagcgaaactctgtctcaatgaaaaaataaataaataaataaaattaaaaattagcagggcatggtggtgcatgcctgtagtcctagctactcaggaggctgaggtgggaggattgtttgagcccaggagttcaaggcttcagtgagctatgattgcacaactgcactccagcctgggcaacagaacaagaccctgtctctgaaaaaaaaaaaaaaatgtggaaattgtgagagacacatgacaacagaaatgtgactactgcttgcctctggaggaaggaagaggtggtggaggagagataggtggctggacactgtggcaacaccagcataccaggggctgggagtggggggcagtcaggacatgaggccagaagctgtgaatcttggaatctgcagagtgccccttatgagaccccaagcattcatgtaagcgtccatgcccccactgatgatatctgggcagagaggcaataaaatcagagttgttgatcaagatttggaggctgcggttggaggccggacatcctgcctgcagggcaggcttcagcttggaagcttgcggcccagaacagtccccgtgggcacacccaggcagagggttttgctaggtgtctgacccagcttccaaagccagggtctaataacaacagcgccaccaacaacaggaaacatttgtgacgcacatgctgccaaagcactgttctaagcactccttacagtttaatcctcccaacaataagaatgaggtaggtaccagtgctaaccccattttacatagggggaaacttaggcacagagaggagaccccatgaaaggcaatggggacacctccaggaacctcccaccaaaaaagatcactgcagagtaaggacaaatcgaacatcagatttcctcaagggtgggcactttctcgatgcatttctggtgccctcttttggatttcagcctcagtggccacaacaccacgggtgtcagtgacaggagcaaaccaaatgcactggggactcagctgggaggagccgccctggcattcccaccatgtccgtgaaatggggggaatcgtggtatgtacttgagaatcaacagaggctgggcgaggaagacttgggatacttgtgagcccattctaacatcagcaattgctaatatcatgtttattgccttgaataaaagagatgaagaaataaaggaaaaagaggaaaggaagggggaaaggaatgaagaaaggagagacaagaaataaagcattttaggccgggcctgggggctcacacctgtaatctcagtacttgggaagactgaggtgggcatatcacttgaggtcaggagttcaagaccagcctggccaacatggcaaaaccccatctctactaaaaatacaaaaactaggccgggcacggtgtctcacgcctataatcccagcactttgggaggccgaggcaggcggatcacgaggtcaggagatcgagaccatcctggctaacacaatgaaactccacctctactgaaaaaaaaatacgaaaaaagttagccgggcgtggtggcatgcacctgtagtcccagctcctcgggaggctgaggcaggagaatagcgtgaacccgggaagaggagcttgcagtgagccaagatcacaccactgcactccagcctgggcaacagagcaagactctgtctcaaaaaaaaaaatgcaaaaactagctgggcatcgtaatgcacacctgtaatcccagctactggggaggctgagacaggagaatcacttgaacccaggaggtggaggttgcagtgagccaaggtcgcaccactgcactccagcctgggcaacacagcaagactccatctcaaaagaaaaaaaaaagaaaagtattttaatatcaaagaagaaggaagagggccagaaagaagagatagggctgaaaaaagaaggcaggaaacaagcagaatgtttccaaagagtcccatgaactattcagaaaacagttgttttgttttgttttgttttgagacggagtcttgctctgtcacccaggcaggagtgcagtggcatgatctcggctcactgcaaccccacctcctgggttcaagtgattcttctgcctcagcctcctgagtagctgggattataggtacacgccaccatgcccagctaatttttgtatttttagtagagacggggtttcaacatattggccaggctggtctcaaactcctgacctcatgatccactcactttggcctcccaaagtgctgggattaccgcgcccggccaagaattttgtctttaaaggagttgacagtggggtgtggaccgtgtagccgagacagcttgcagggtgagttaagagtccgcctggattccatccccagccctgccacactttgtccatgaagcaagtgactgtcccttcccaagcctcagtttctgcactgcagaatggggaccattgtccgtggcatttccacaggttggcgtgagaacctgttgagcccacgcagcaaggtgtgcctgttgtctatggtaaggggcagacggcattgcctactttccactcgtaagatgtcattgcatgtacccggttctcacttggcagatgaatcaaagggctataaatagccatgtcttggtttctcataaacgcattaaatatgacttggcatcttgcccaggcttcctgtcagggcagtggacgaggattgttttgcagaggtctgatgagtgtcaaggttatagtcacgtgcaggtgcgtgaggcaggactcgaagtgagccccagctgccctggggaatgagggggtcttcccttccacccccatgccctccttggcataggtttacaccagccactgtgggccctggcaagccccgccttgtggctcaggctgggccactggcctctttgctggctttgcctggactcaccccactggtccagcttgcatttggtcagtctattcacaggtgaattctgggaagactggacccggctatgggaagaggggagaggagggaaaggtggacacatgactcgtgagcttgctgggctgtcctgggcccctccctccatcttacttcatgaagttctctgaggctgacctcacccctgactcagggatgaggccctgggggtggcagatgtggactctggaaccccgctgcctaggttcaagtcccagctgctccatagaggacctcaggcttgtctatgctctcagtacctcaatttcccccctctgtgaaatgaaggtaatgcctcatagaatctacctcatggggctgctggaaggattcaatggatgttgatcatgatcatgatttcctgatactcagaataatgccaggcacagattatctgctctgaaaaacgttttgctattattatttttctgctagtgatagttaagagcaaggactctagacccagcccagttgggttcaacgctcagctccaccacttgcaaccaatgtaaccttaaacctggatataatctctctgtgtcagaggcatgtgaaccagaacaactccatcttgaatggggctgggtaaaatgaggctgcattcccagatggttaggcattctaactcacaggatgagattggaggtcagcacaagatacaggtcataatgaccttgctgataaaacagtttgcagtaaagaagctggccaaaacccaccaaaaccagagtgacctctgttcgtcctcaatatgacactcccatcagcaccatgacagtttacaaataccatggcaacatcaggaagttaccctatatggtctaaaaaggggagacatgaataacccaccccttgtttagcgtaacatcaagaaataaccataaaaatgggcagccagatgccctcagggctgctctgtctattgagtagccattctttattcgtttacttttttaataaacttgccttcattttactctacggaattgccctgaattctttcttgtgcgagatccaagaaccctctcttggggtctggatccggacccctttcctgtaatgtctgtgcctcagttccttcatctgtaaaatgggagtgatgattatctgtaccttatagggtgtaatagggataaaataagcaaacacccgccaagtactcagacgagagcctggcacacagtaaatactccaatgttgttgctaccattgatgttcttgttacaggtggttgtgctcaccccgcatcaaggttgctaagctgctgtgatggaatcctggagctgctgaaggacacctcatctctttgtgggaagcatctgcttgaggattaagggaatgcagaaaaaaagtggagtagagagatggaggaagatgactttcgaggacattgtgtgagcacctggatctaactgtgcctgaagcaaaactcaaaccctggactctcaatgtattggctctcagttccaagacccaataaattccttcttagcttagaatgctttgctcagatgtctgttacttccagccaaatgtgttttaatacagaaagctcttgggggctcaaataacagaaagggaagctatatgagaagctgagggaagctaaggagaggaacagaagtgatacagcagggtgtggtggctcacgcctgtaatcccaggtctttgagaggctgaggtggtggaccacttgaggtcaggagttcgagaccagcctggctaacatggtgaaaccccatctctactaaaaaaaaaaaaaaattagtcagacgtggtggcatgcatgtgtaatcccggctactcaggaggcttagtcaggagaatcacttgaacctggaaggtggaaattgcagtgagccaagatcatgccactgtacttcagtctgggcgacagagcaagactccatttcagaaaaaaaaaaaaaaaaaaagaagtgatacagcttaagagagtaggccatgtggaggccacatgcatcatgggttagaatccaggctgttactgagagcttgtggtaggatgttgcagaatggacacactctttcatgcctccttgtgtacattcttacaaggtgactttgccactcttcccatcaagggatggagtctgtgtctccaccccttgaatctgggctgaccttgtaatttcttttggccaatcaaacatggtgaaagtaatgctgtgttagtttcaagcctagacttcaagaaaccttgccgcttccatgtactctcttagttgatcttgccatgaccttgtgaacatgaccgggctagcctgctggaggatgagaggctggaggctccccagcgaactgcccatccagccccctgaggcagagccacctagctacacagtgctggccacagatacatgagtgagcccaacctacattaccaacctgcagaatggacagataaatccatcaatgttgttttaagccattttagatgatttcttaggcaacagtagagaactgctttgtctggtttaactcaaccttgcccaagggccttccaaaaccctgacctccaggtcacatgacaaggtgaggcctctacatcccagtccctggtgatactgtgctagtttggaggctgggtctcaagtgaccttgcaacttccattcactttcttggactcctgccaccaccttgtggacacacctgggttggcctgctggaggatgagagagcaggtggaggagaacccagcggctccagctgatgacatctggtccagcctacagagagccaactatcgagtcagccaagatcagcagagccaaccccaattcactgctgctgatcagagaagcaagaatgatcacagctgaaaccagaactgcccaactaatttgtagacttgtaagcaataatgaatgcttacaattattattaaacaataatttaaatctctgacttgggggatgttttgtttgcagccataactgatacactaaccgatacactttgtaaacatgggcaaataaactcacatctctgtgccagagttcctcttgtgaaaaacaggaaccatttgggatggtcatgaggatgtcatgagctcatgatcctaaaactcttggcacagagcctggctgtcttactctgttcaggctgctataataaattatagcctaggtggctatagcctagccatagcctaggtggcttcaacaacaaacatttatttctcacagttctggaggctgggaagtccaagatcaaggtgccagaagtgatgtatgatgagggctgttccctggtttgcagatggccatcttcttgctgtgtcctcacatatcagagagcagagagagaaaaggcaagctctttggtgtctcttataagaacactaatcctatcatgagggctccaccctcatgacctaatgacctcacaagagctcccctgcaacactatgccattgggggttaagatgtcaacatgcaaatttctgaggagacatgcagtccataacattggcagagagtgaacactcaatttaaaaagaggtaaaatgaaaggcagagagacagttgaataacaccctgcccaccatgaacctttttgccttgtccagacagctgtgggtcatttttctttctttctttctttcttttcttttttttttttttgagacagagtctcgctctgtcacccaggctggagtgcagtggtgcaatctcagctcactgcaagctccacctcccgggttcacgccattctcctgccttagcctcccgagtagctgggactacaggtgcccaccaccatgcccggctaattttttgtatttttagtagagacggggtttcaccatgttagccaggatgttctcaatctcctgacctcgtgatccgcccacctcggcctcccaatgtgctgggattacaggcatgagccaccacacctggccagctgtgggtcattttagtgtagcctcccaatggcccataggtccccagcctcttagcccttcatatcaccaacacagagacattccttggtggcagaacaaaaacccttgggaataagaaccacgacctggtaatctgagacctaccgattcagaacaggtagcagcacattgttgtaaaaagctctggattcagttagacctgggttatgatccaatctctgccgtttacctgacatgtgatattgagcaatcaatgcaaccattccaatcttccattttatccctgtaaaataaggataattgtacctacctcccaggagtcttgctcaatcatttcttccttcagtttagtatttttttattttttatttttttaaacagagtctcactctgtcacccaggctggagtgcaatggcctccagctcactgcaacctccgcctcccaggttcaagcaattctgatgccccagccttccgagtagctgggattacaggcctgtgccaccacgcctggctaatttttgtatttttagtagagacagggtttcaccatgttggccaggtggtccggaactcccaacctcaggtgatctacccaccttggcctcccaaagtgctgggattacaggcatgagccaccacgcccagcccttcagtttacatttattgaggtcttacgttgttccagctctttcagaatctggggatacaatggagaacaacaaccacaaattcctgacctcatggagctctcaatttgtagcttaaagaaaaatactaatctgatagtgacagaaacagtgaaaaattgcaaaagagacaagtgttttggaaggagaatgtatcagtcagaataggctgggttatgctgtggtaacaaacatcccccaagtcttagcaccttataataacaaaagtttactttttatctgtcacatctattgtaggtcagtttcacttctcctccttttcaatccaggctggcagaatggtctccaactcaagaattgtgggctctgtgcagagggaaagagaatcctagagtatctttgcccaggcaattaagtgctctggcctagaagtgactgtattacttctgcccacacttcattggccagaactagttgcaaggccccacccaaccataaggaggaccagaaatggcattccgtcctatgcttggaagggagagagccagggggattcagggagcagcactaatgaccattctgaaagcatatgtgtgatgggaagacttccatgaggcaatgatgcttgaagtataagagcagttaactaagagaaggggaaagtaagagttttctaggttggagggcacagcatatagtgaggagagtaatgagtagaaacagcttatgcaaccagtttgattggagctggaaggagcatgtgtggtgcaaggaaaagggaaaagcgagcagtcatccatcgtgcagtaaagaggttttctttttgagacagagtctcactctgttgaccagtctggagtgcaatggtgtgatctcggctcactgcaacctccacctcctgggttcaagcaattctcctgcttcagcctcccaagtagctggggttacaggcacccaccaccatgcctgactaatttttcgtatttttaggagagacggggtttcgccattttggccaggctggtctccaactcctgacctcaggtgatccacccgcctcagtctcccaaagtgctgagattacaggtgtgagccaccgcaccctgcctgtaaagaagtattaatagatgccaatgaacttcctatgtctgaacaaggaaatgataagtatatacaagttttaggaattcagagaagtccatattattctcaggtcaacaaattatttgtacaaggaatcagaattacagattctttttttttagtggttagaattgctttcacaggacatggccacaatttctgaatccccacctgggcgttaattggccagatggccaacaatttacctcctcttcctgggcacacaggcagccatatttcccagcttgctttgcagttgaggaggggtcatgtgactgcgttctggccaatgaaatgttctggccagtggacaaaacagatgacacttctaggcccagctctacccttcatactcagttccatgttctctctgtccattgtgtggtgaccttggaagccagtacttcagatggcagcctgcattcctgagttatctgaatcaagtgaaagaaagccacctgagctgagactatgaggttgaaaccatgccccaaagagttaaaagaaatcagtaactaacagaaattcttgagtttgcaggatggcagataagaacaacttgcggaaatgtgaaccactccctccacttatgagataaaagaactggctgaaatcaactggaaacaatatggctaagtggagtctgtgcagaaccagtttgctgaagtcacagcccaaagtttcatactaacccgtcaagtttgcacatgggaccccctaaggaggcatgagagagaactatgcatgcctgaggactttccagacctccccttggcttccaccaatcactagctaatcccagaatccaccccctaacctttcctggtaaaattactgccttaaagccagcatagggagacagatttcagtgggactcctgtctccttggaagttaacctgcaatataaagcttttattttctcaaaaacctcatgccatagtattggcttgttgtgcatctggcagcaaaccccttttgcttgatactaatgtaagcaggaaacaaacctctgtgttttattctggagcgtatttattgctgcagtggagcctatcctatactgactaatacagagtaacaaatgagactccttcaatagcagtaggatttgccaagacaatttttttttttgaaatggagacttgctctgttgcccaggctggaatgcagtggtgcaatctcggctcactgcaacctccacctcctgggttcaagtgattctcctgcctcagcctccccagtagcagggattacaggcacatgccaccacacctggccaactcttgtatttttagtagaggcagggtttcaccatgctggccaggctggtctcgaactcctgaccttgtgatctgcctgcctcagcctctcaaagtgctggaattacagatgtgagccactgtgcctggcctgccaagacaattttatgatgcagaaagtatctgtattcggggttgtcatgtggagttgtacaagttgagcactgcccgacatgtccagccaagggatgaggggaacccactccatgctccactcaccaggcctttatacaatttgttctaaggtgacaatttgttctaaggtgatatagacaatttgttctaaggtgacagctttagaaagaaagggaatattttctccttttctttctctggcagagtagaagagccgtatagcaaggctaagtactggaattgcatttataagcaattatttttttccccaaaaacataggcctaagaagttaaaaaattacaataagaaaaggaagagggaagaataggatggttaaaaatggaatctggggcgtgttttgtcttacgctgtactctgttgtgcaggggagggtggcaaggctgggcctgaccatgtctcctgcttggtgaggaaagtttcttattgtacagctggccacacgcaaagcggctgctactccctgctgcaacctggggggcaacccacccttacctgtaaggaaccccaccttgtcagaatcacttttttttttttttttgagatgaagtctatctttgttggccaggctggagtacagtggcgcaatctcggctcactgcaacctctgcctcctgggttcaaacaattctcatgtctcagcctcccaagtgctggaattacagctccgccaccacgcctggctaatttttgtatttttcgtatagatgggttttcacagtgttggcaaggctggtctcgaactcctgacctcaggagaatcgccattttaagtggacatcaggtcatgtctctccactgctcaaaaccctcacgtggctcccatttcatttcaaataaagcccacagctgctatcctggcctacagagtcccacacactctcggccctggtgacctccttgatgttctctccacagttgccttcctgtcctaatcagctccgtccaccaagtagacacccagccccagagcccttatatacgctgcctgtgcctgcaactgcttggggtaggctgaataacacctcccaaagatgtcactctaatccccagcacctgtgaatgttacccctggggacctgcaagaggatgtgtagagtgtgccttacaggggtgaggaagctgggtgctcccgttcccatccctcgaggttaaggactgctcctggggtgtcaactgcccagcttctagcctgctccatgagtggcccagcaggcttctggtatgagttaggaaacccctggcacccactggaatcatgcccatgactgctaaagctgcaggggacttccaggtcttttcagggatatgggtgagtgtatttgttgtctgttgctgcaaagcagattgccagaaattcagtggcttaaaacaacacacgtctatgatctcacagtttctgtggatcaggagtccaggcacagcttagctgagccctccatctgaggtctcagaaggctgctgtcagacacggatcaggctgcactttcatctggaggctcgactggggatgaatctacttctgagttcatccaggttattggcagagttcgtttctctctggctgtgtgactgagggtcctggccttttgcttgctgtcaactgggagcctccctcaggtcctagaggccacttgcatctcctggaggccacccacagctccctaccacgtggacttcctcaatgtggctgcttacttcatcaagccagcaaggctccctccctctgatcttctaagacagagtcttagataacataaggcaagctagggagtgacagctcaacacctttactgtgtgctattggttagatgcaaggtcacaggtctgtccacactggaggagaggggatcatacaaggcatggacaccaggaggtgggaagtcactggggtcaccttaggagctgccctgacagccttggagcactggggcactgacagcctctgctatgggttgtgagacttcagtgctgcgaagaacaaaccccttgagtgtgggacccgtgcttgactctctctgtcccacctccagctcccatacaatgggggcttctatgggttgcaggcattggggggctccctgggacctggggtgggcgcttcaggtctcctttcaccttccaaccactggccccttcccaagctcactgtgtgacctcaggcaagttgcttgaagcttctgagtcttgatgttctcagctgcaaaacaaggttaacagtagcaccagcctcttgggtgatcgtggggacatagcacttacaaagggtttgagttttgacctcaccaggaagtccccaaatgtttgctatgattatcattattattgtctacctctggttcccagggaggcctctttagttctcagggaacgctccctcattctgcaggaatctttgagcatctgggcaccacatgaagccttaagtgttttggcaacagtgtctggtacacgaaggatgagccctgccctatcctgggggcagaggttctgttctgggagagtttcatctctgtccagtcatggcttcactgcactattagggcaatgaattttaatggcatgaattatttttcactcttgcactctgctgaacagtgtgtgatttctgggaacagtcaggcctggtgattcctgcaggtcagctgagccaggcctggcaccttgtaccagcaaaagggcctgtctccccttccaagggcctgaggggcctcactccaccacaagagcctggaaaagtggcgcgtgtctggcagtgcctctgacttggggagtggtggctgggcctgaaggcctgggcacagtggggagggtgggcaagggatgggcaggaaaagacagcagggcccagggcagatctggggagcctagaggtgtcctgctcatatcccccatcttgtagttgggggaatgggatgagtgaggaggctatgagttaccacctttagggagacaccccaagaatggcctggttccatctctccctccttctgaagaacacagggcttgggacaggcaacctggtttgaactagaatcaccagcctcagtttcctcatctgttctatggaaattactaatgagttaacagagcagcacctgacccagggaagagctcggtcaccctgggctacggggcaccggggcggaagtgacagaaggggcggctgtggctaagagagaaccggaggccgggtccgcttgtgcaccgggggctcgctttatttcaccaccagcacctgtgtgcttctcctgcccggggaagggtggatgcacttgagcagcgcccccagcagggccaggacggtgaccacgagcagcaccagcttcagccccttgagcacggagtccgccctgccccgcagggccttccttgcctcccgccactgggcatcgttctctctccactgagcctccagcgtctccagactggcggcgggtttgaactgggccacgagctcctgctgcacgaagcacttgtagacggccggctggaaaacctgcagctgcctgccgccggtggaggggtccagaaaggtggtgaagtcctggccggagagctggctctcccacgtcaggggggtgtcgttggcacgccagttgacgggcctgcgaggaggacaaggtcaggtgcagggccagggagaaaggagggaccgacgtctccctgaggaacagaaaataaagcaccgcccagtccccctcctcgccaccccccacggagcactgtgcagccgtcaacagtggggtggaggaggcacagctgggggctcccagggctccacccgttactggccccaccccttactggctcccctcttcctggctccaccccttactggccccaccccttactggctgggtgacctgggcaaatgcctccagctctttgaacttccatttctttatgtaaaactaagagtctagaccaggcttggtggctcacacctgtaatcccaacactttcagaggcaaaggcaaggaggatggcttgagcccaggagttcagaaccagcctggacaacaaagcaagaacccatgtctgcaaaaatttaaaaaattagctggacatgctgacatgcgcctgtggtcctggctgctcaggaggctgaggtgggaggattacttgagcccaggaggttgaggctgcagtgagccagtcacagcactgcactccagcctgggtgacagagcaagaccctgtcccaaaaaagaaaacaacaaaccaaaaaaaatggagagtaatgattgtacctcataaggttatttggaggagttagcaagggcactccttaaatgatttgtccacctgcctttgcctgtctggtctcatctccttcactctcccctttactcactctgcctagccacgctgctctcctagatgttcctctgacatgctgggtgcagtcttggccctggctgttccctctgtccccagggcttcctcgcctcctttcagtctgggctgaaatggcagcttctcagaggagccttccctgaccccaccacttgacacttttaacctcccctattcccagcatcccttcctgctccgtcaccatccaaaatactataggtcgggcacagtggctcaggtttgtaatcccagcactttgggaggccgatgtgggaggatcacttgagcccaggagtttgggctcagcctgggcaacaaagtgagacctcatctctacaaaacttaaaaacttagccgggtgtggtagtgcatgtctgtagtcccagctactgtggaggctgagatgggagaatcacctgagcccggggaattgaggctgcagtgagctgtgattgtgccactgtactccagccagggtgaaagagcaagaccctgtctctaataataataacaataataataataaaactatatatttatgcgccacaagggcaagaatctccgttggttgtgttcttcactgtttcccaggtccctagaatggagcttggcatataaatatgcagtgaacacgtgtttagtggagaaatgaatcaggcaccgacacacccagcgtggtggaagaacagagaggatattccacagacaatatcataaaagcttgcattcccagctaggtacattgtggaacttcttattggatgctatggcaggcactctacagtctttagtccccttaacacatcacaatgaccctgtgtggccaggggctggcaagacctctgcactgagttagacagtggcccccgcaaaatgcatgtccttcccagaacctcagaatgtaacattatttggaaattggatcattgcagatataatcagttgagatgagagcatattggaataaggtgggccctcaatcccatctgaccggtgtccttttaagaaaaggaaaagagagacagggacacagacacccaggaagaatgccaagtgatgatggaggcgggcattggagagaagcagccacaagccagagaagaccgggatctctgactgcatccagaagctagaaaaaaggaggattctgcccagctcactcagagggactgagagggagcgtggttctactgacaccttgatttcagacttacggcctccagaagggtgagacaatggatttctggggtttttttgtttttttgttttttgagtcagagttgtctcgtgatgttgcccaggctggagtgcagtggtgtgatctcggctcactgcaacctccgcctcccgggttcaagtgattctcctgcgtcagcctcctgagtagctgggattacaggcacgtgccaccatacctggctaatttttgtatttctagtagagacggggtttcaccatgttggccaggctggtctcgaactcctgacctcaggtgatccacccacctcggcctcccaaagtgctgggattacaggcatgagccaccgcgcccagcctgcatttcttattaaggggcaggtggactgggggagaggaggggaaggggctattttccagaggctcctggcaggaagtaagaagatgagtgtgagttctgggaggcaggccttgatgggaagccccgggggcaccagcctctcctccaaggtctcactgacctttccagatgaagcaggggcctgttggagcccctaagcttcctgggcttcccccatcacagccccatctgtctgcctgggcttctcccatcccggctcgcaccaccctgggctgtgtccccctcggactgtttaagagcagggcctggcactgtcctgatgaccactacgtggctgaactgcaaagaacgcccactcatccctctgcacatattaccaggaaggatcccctgaccggaagaatctgggtaggggccagaggcagggattccatcacctgtacatggatcctaagggacagtcgagccacacaaattctgtcttctcatcgagcctgaagttgtcaaaaatgacgtaatccacccttaactgtgtgttattggtgcactggacgtggcaggcttccacctgcagctcaggccgcaagcggctagaccacaccagcacctctcccagatagagccagcagggcatggcttcctccagaggctcctcaatgtagcggtaccccaggcgtttacactcgcccggctcctcacagcggttgcagtcctgccagggctcccaccaggtaaaaatgagctgtttgctgcccaaatgcagggtctcgttctgcaggggcctctgacccaggtccttgtgtgttatatgcagggtggtgacatcctgaaagtcaatttcatactgcaccacttggcggccattcttgttccagcagtggtagaggcccgtctgggagggcaatggatctttaatgagaaggctgccctcgggcattatttccatattggaaatattggtgaggctggtgagcctgcccttcttgccttgtgtgaataaatagtaccagtgcgcccccgaggagttgcaatacaggagaatatcattgcctgagagtagggcctgttggcactgcttaccactggggcagctgatggaaaagtagaaccccagtgccggggcagcaaagtggagcagcagccacagcatgggtggcatggtggactggggctgtggcagtgggctggtgccaccccgaacattgtgaggtcacccatgaactctggcctcagccctgggcagtgggatgaattgcagctaccacatgtgtgtgtgaggtcaccatccccttttgttttgtgacaagctgacaacactgtttttcttttttttttttttttcagacaaggactcgctcttttacccaggctggaaggcagtgctgcaatcacagctcactacagcctcaaactcctggaatcaagtaatcctctcacctcagcctgttgagtagctgggacttcaggtgcatgctaaccatgcccagctagtttaaaattttttctgtagagacggggtcttgttatgttgcccaagctggtctcgaactcctggcttcaagccatcctcccaccttggcctcccaaagtgttgggattacaggcgtgagccactgtgccccgctgaccatatttaatttctattccaagccctccattttgctgggaaaggagcaaacttaatttgtctattcagagttttctctactacctgccccgcttcctttcccaggggtgagactacattcccagggatgaaataagagcatgaaggtgtcacatgtgaacactcaacacatatttcctgaactcttactatgttctgggcacacttcttagcactggggataaagcagtaaacaaatcctctcgggctgggctcggtggctcatgcctgtaatcccagcacttttgggaggctgaggcgggcggatcacctgaggtcaggagttcaagaccagcctggccaacgtggtgaaaccccgtctctactaaatagctgggtgtggtggcgggcatctgtaatcccagctactcaggaggctgaggcaggagaatcacttgaacctgggagacggaggttgcagtgagccgagatcgcaccgctgcactccagcctgggtgacaagcgtgaaactccatctcaaaaaaaataataaaaatttaaaaaaatttatctctggttactgttctgacctcctgcacctttccccctactccctaccctccaaccacgctggcctcccgctgttccctgaatctgtcaggcaggcagaggggctcttgccccagaaccattgcacatgctggtccccgtctcttccctcagccatctgcatgactcaatacatcttcaacaaatatttttctcagttgctccctttccttccatccccttttctaaacaccttctcaggcggtggctcacacctgtaatgccagcacttgccagcactttgggtggccaagatgggagaatcacttgaggtcaggaattcgaggccagcctggccaacacggtgaagccccatctctactaaaaatacaaaaaattagccaggcatggtgtcgggcatctgtaatcccagctactcaggtggccgaggcagaagaatagcttgaacccaggaggcagaggttgcagtgagtgcagattgcgccactgcactccagcctgggtgacagagacactgcctcaaataaataaataaataaataaataaattaaatgatcttccagacttttcccaacatagaaaaagatggaagatttctatgagacttgcatcaccttatctcaaaaccttataaggacattacaacaaagaaaaacctcaggtcaatctcttttgtcaacacagacacactatcccaaagaaaatattgcaaattgattccagtgattttctttacacaaggataaatataaagaccaaattgggttatttcaggacggcaaatttgggttatatttgcacatcaattaatgtaattcaccacattaacagaataaaggagaaaaaccatattattatctcagtagatacagagaatgcatctgataaaactcaacattcatttatggctcaaaacttttggcaaactaggaacaaaaggaaattttctaagaagataaagtgtttctattaaaaacctaggacaggccgggtacagtggctcacacctgtaatcccagcactttggaaggccgaggcgggtggatcacctgaagtcaggagttcgagaccagttagggtaacatggcgaaaccctatctctactaaaaatacaaaaattagccgggtgtgatggtgggtgcctgtagtcccagctacttgggaggctgaggcaggagaatcatttgaacccaggaggcgaaggttgcagtgaactgagattgcgccattgcactccagcctgggcaacagagtgagaccctgtctcaaaaaaaaaacaaaaaacaaacaaacaaacaaaaacacctagggctaaattatacttcatagtaaaatactaagaataacacaagtatttctgccatcaacttttccattcagcattttactggaggtaagatacaagcaaaaaattagatataaggtcatatattaaatatgatttatataccagcaacaaagaattaaaagatgaaacttaaaagattactataggatagtatgaaaaaattaaatacctaggaataaatataataaaagatatgtgagtcctctacattaataacttcacattattgggagaaattaaagaaagactaaacaatggaagtatttgccacattcacggattggaagactaaatattgaatatatattgatttaccccaaatttatctttagattcaataaagtcccaattaaaaaaaaataagagttttggggtggaaactacaaaccgattccaaaatttgtatataatgggccaagaataaccaagacaatcttgaagaacaaagttgggaaacactaccacatattgtgacttattgaaaggtataaaaagacactgtgggctgggtgcagtggcttgtgcctgtaatctcagcacttgggaggccaaggagggcagaatcacttgaggtcaggggttcaaaaccagcctggccaaccccttctctactaaaaatataagaattagccgggcatggttgcggatgcctgcaatcccagctacttgggaggctgaggcaggagaatcgcttgaatttgggagatggaggttgcagtaagctgagattgcgccattgcacttcagcctgggcaacagagggagactccatctcaaaaataaataaacaaataaaaggaaaaaaaaaaaagaaaaccaaagacactgtggcattgggacaaggatggatagataaattgtatccagggtccaatcaggagacagaaacatcagtgtctacattgtcatgagcccatgggcctgagtagctcggtctctagattctacatttggcctccccctgaatatcagaagcctgtgcagacaagaactaggtcattgctgtgtccctaacatcacctgcccagggcacactcagaggaaacaccagggaattcttcctgcatgcgcatctcagcaagccagtgaggagaccttttccttagcagaaccaacatgaaggcttatgggctgggagacggagcccggttttctgttggaaggtaacccatgagcccaggtgaacacagaaaacaaagtctgggtgagggtcaagggcagggctacggccctggtcctgtcacctgtagatggaggccaaggggcaggtgagccacctgttgttcatccacttgccaggctggtaaaaatcaaagatgaggtatggctagtgaatttccttgacggggttgcagggtacgtggcaggcttccacctgcagttcgggccgcatgcggctgaattgcatcttctcatctctcagatacagctggcagggcataggtttttccacgggctcctcaatgtagcagtaccccaggcgtctgcactcacccagttccccacagcggttacagtcctgccgggggtcccagtgggtaaagatgagtaccttgccatccaggatcagggtctcattctgcagggacttttggtccaggctcttgtgcgtaacatgaagggtggtgacaacctggaagtcgatctcgtattgtaccatgagggtatcatcattgccctggcagcgatagaggccagtctgggagggctgagggttggtcaattgaaggctacccccaggcagtttccttatgtcaggcattgaattaagcagagaaggatcttccccaagaatggaagagaagtaccagagtgccatgggatggtcacacttcaggacagcatcactgcctgagagtagggctcgctggcaaaggtccttgtaggcacagctgattaacatctaggctcacagagtggggcaagaaaggctaagcagccacagggtgtccagcatagtggaccaaggctgtagaaggaggctaggaactccctggccattgtgaagtcactcacaaaactcgaggatcagcctaggcaatggaatgaaacttgatccactgtgcttccaggagtacaattcagttcgtgtcatcaaatggcttgtcataggttgtagggtcgaaggtcaaatatccacatgagctaggcaggaaacaaaatgggtgagcttaaatcagaacaaacgaactacaaaggcaaattattggccctccacatacccaatatataatgatggaatgggacaaaatgactttatgaccatcagaaagtggaagaagaggcagggcccagtggctcacacctgtaatcccagcacactttgggaggctgaggccggtggatcacctgaggccaggagttcaagaccagcctgaccaacatggtgaaaccccgtctaaccccgtctctattaaaaatacaaaaattagccaggtgtggtggtgcatgcctgtattcccagctgcttgagaggctgaggcaggagaatctcttgaacccgggaggcagaggttgcagtgagctgagatccaccactgcactccagcctggacaacagagaaagactctgtctcaaaaaaaaaaaaagagaaagaagaaagaaagagagagagagaaaaagaaaagaaagagagagagagaaagggaagacacacagaaatcactgctctgtaccacttctgcaatccagtgggaaaacattacaaggaccccctatcttgtagatgggaaagattccttaactagcaccgaagcagctccttgttgtgtgtggggagggtagggggattcccaaatcattgttctctgtgggtcatgtctcactctccagggaaatatctccttttctcatattctccttggctacatctgaagatgtgccctccttgagacaacagcagtttactcagcctgctttctatctcccacagtttgggacctacggttcttataagcctctagtcaactaaatatgtaaacaaacaaacaaacaaacaaacaaaaacacacacatagccgtagttctgttcgagatgttctcaggctgggctcggtggctcacgcctgtaatctcagcactttgggaggccaaggtgggaggattgcttgaagccaggagttcgagaccagcctgggcaacatggtgaaaccctgtctctcctaaaaatacaaaaattagccaggtgtggtggtgggctcctgtaatcccagctacatagcaggctgaggcaggagaattgcttgaacctgggagatggaggttgcagtgagccaagatcacaccactgcactccagcctgggcaacagcacaagactctgtctaaaaaaaaaaaaaaaaaagatgctcttatcctctctctctttctgtctctttctcatttcaggtaccttaaactctatcagccatccttggcgagctatatctcttaactctctttcatggagacatttgtccacctgaaagcgttttctggtagtatcttaattcattcagagaatttttaaacaatgggtaataattatttacctaggcttatacttttgattttatccttgtcaaaagctgaattctaattggactttatctctcaaagcccttctcaatttttagctaactttggccaacttatactgctaacatcttatattccagcagcttccttgaaagctacaagtccattaaatacattatctgccttccagagtatctcaggcaacagcctccatccttctggtttcaaataagtgtcttagtcccaaaggtatctaagccaatgctgtctttttatttttgattacctcagcaccctactcctgatactattttggt[138 bp omitted]cctgtctctactaaaaatacaaaaaatgacaaaaccctgtctttactaaaaatacacaaattagccaggtgtggtggcatgcacctgaagtcccagctacttgggaggctaaggcaggaagatcacttgaacccgggaggtggatgttgcagtgagctgagatcatgccactgcactccagcctgggtgacagagcaagacttcatctaaaaaaaaaaaaaaaaaaattccccccaaatctcaaccacataaaacaactaaggtttactttttactcattgtgcattggtattggaatcactcaggaatccagggtgatggcgcaactgccatctcaaacattttcagtttcttccaaggagaaagaaagagctctctgtaagattttgggtctacattaaatgctttgcccttaagtaacacatgtcatgtcgcttgctcacaaaccattggctagaaacagctacatggcacca[136 bp omitted]aaaccccatctctattaaagatacaaaaaaattcgccgggcgtggcggtgtgcacctgtagtcccagctgctggggaggctgaggcagcagaatggcgtgaacctgggaggcggagcttgcagtgagccgagatcgcgccactgcactccagcctgggcgacagagcaagactccatctcaaaaaaaaaaaaaaaaaaatggaactctactatttccaggaatcttttggcaaatggcagtaatgatttccatggctaatgtctattacaagggatttttcctctggtgttctcctttatatcacagagttaaaaccatttccaaaatcctcacatcagctctcccctaaagttctactggccaggattggggcccatgcccaggtctaaaccaatctctgaaaataaatgaagcttacatcgttggcttaaaccaattagaatttgttgcctaggattgggtaaggtcagctttttcttagcagaagccactgaagacccagacaaaatcagggttttgtatgcaggggagttgtagaaaagaatgctgatttggtgtagccaaccatgtcttccacagcattgactgatgggaaaatattagttgtaccagaattgtgccaggcactgtgtgagccacatgaccccaggcaagttgctgagactttcctttttttttttttttgagacagagtctcactctctagcccccaggctggagtgcggtggtgcaatcttggttcactacagcctttgcctcccaggttcaagcaattctcttccctcagcctcccaagtaggtgggattacaggcatgtaccaccatgcccagctgatttttgtatttttagtagagacggggtttcaccatgttgaccaggctggtcttgaactcctgacctcaagtgatctgcccgcctcggcctcccaaagtgctgggaatacagatgtgagccacagcacccggccagaactactggagactggtaaatttataaggaaaagaagattaattgactcacagttctgcatggctggggaggcctcaggaaacttccaatcatggtgcaaggcgaaagggaagcaggcaccttcacaaggtggcagcaaagagacagcaattagggaactgccagctacttttaaagcatcagatctcatgagaactccctcactgcacgggagaaaccactcccataatccaattaccttccactgggtccctcccttgacctgtggggattacaattcaagatgagacttgggcggggacacaaaaccaaaccatatcactcatccaccttgcaccagacaccaaggatccaggctaagtccctgacctcttggagcttacatcctagtggggatgtattagtcaggataggttaagttatgctatgtaacaaaggattctaaaatcttagtggcttaataaaattttttttcatgcgacatgtccaaatttggctggggagagctatactccacaaagtcccttcagatactgtggctaacagaggtggtaccatctgcaacatcattagttgctatggcaggataagggagtatagcaaatcatgaactggcaattgaatgctttggtcagtgatatggtttggctgtgtccccacccaaacctcatctcatattgtagctctcataatccccacgtgtcatgggaaggacccgatgggaggtaattgaatcatgagagcaggtttttcccatgctattctcatgatagtgaataagtctcacaagatctgatggtttttttctttctttctttctttcttttttttttttttttttttttgagggagagtctcactctgctgctgcccaggctgaagtgcagtggcacgatctcagctgacagcaacctctgcctccctggttcaagcgattcttgtgcctcagcctcctgagtagctggaattacagatgtgcaccaccatgcccagctaattttcatatttttagtagagagggggtttcaccatgttggccaggctggtcttgagctcctgacctcaaatgatccacctgcctcggcctcccaaagtgctgggattacaggcatgagccaccatgcctggtgagatctgatggttttataaagggcagttcccctacacacagttgcttgcctgccgccatgtaagacacgcctttgctcctcctttgccttctgccatgattatgaggcctccccagccatgtgcagctctgagtccattaaacatctttttctttagaaattacccagtctcagatatttcttcatagtagcaagcaaatagactaatacacagatggtaaacaaataaatgactaataaaacatcaggtcatggtaaatgctttgaagaaaaaaagaaggcgcaaagagagattggggatggagactattaggggatgaattatgaccccacaagttcatatgttgaaacactgacccccaatacctcagaatatgactgtattgggaaacagggcttttaaagaggtaattaagttaaaatagggttgttagagtgggttctaatccaatatgactagtgcccttaaaagatgagggaattagaacccaggcagagggatgaccatgtgaggacatagtgaaaagggaaccatctgcacaccaagaagaaaggcctcagaatgaaaccaaacctgccaacaccttgattttggacttctagcttacagaattgcgaagaaataaatttctgttgtttaaaccacccagtctctggtgtttgttatggcagccctagccaactaatatagagactattttatttttatttattcatttgttttgagacagggtctcattctgtcacccaggctggagtgcagtggtgtaatcatagctcactgcagcctgaaactcctgggttcaagtgattctcctgtctcagcctcctaagtagctaggactacagggacgtgccaccatgcctagctaatttttaaaatttttggtagagatggtagactggataaagaaaatgtatacaccatgtagaggcttgtcttaaacttacagcctcaaactatcctcctgtctcagcctcccaaagtactgggattacaggtgtgggacaccatgcccagcctgtggggagagaggtaggtgagaagagaaggcttctctgaagaagtgacatttgagcagacctatataagatggttatgaagattcacacagcggctcatgcctgtgatcccagcactttgggaggctgaggcaagtggagcacctgagatcatgagttcaagaccagcctggccaacatggtgaaaccccatctctactaaagatacaaaaattatccaggtgtggtggtgcacgcctataatcccagctactcagaaggctgagacaggagaattgcttcaacctgggaggtggaggttgtagtgagctgagattgtgccactgcattctagcctgggtgacagagtgagactctgtctcaaaaaaaaaaaaaaaaaaaaaaaaaaatccagagaaagcaaggtctgaactaagcacaccgcacatgcaaaggtcttgaggtgggaacaggtttgctatgtgaatacccatcagccaaagacaatcaggcatgcacctatgaacaaagttaggttttttgacttgctgcagtgagggcagatgtacaccatggggaatggtgtggtgtctcaggaaggtgtcagagaagactaacagaatttgggctgtgttgtatgattgtgggaaggattcaaagaagtggggatttgctttgggttgggtgctatcaaaaagtgtaaccaattcttttttttcaaacttttgattttaagttcaggggtatgtgtgcaggtttcttatagaggtaaatttatatcatgggggtttgttgtacatataatttcatcacccaggtattaagcctagtaccccttagctatttttcctgatcctctccctcctcccacactctaccctctgataggctccagtgtgtgttgttcccctttatgtatttgtgttctcatcatttagattccacttataagggagaacatgcggtatttagttttctctttctgcattagtttgctaaggataatgaccttcagctccattcttgttcctgcaaagggcatgatttcattcttttttatggctgcatagtattccatagtgtatatgtaccacatttttttaatccagtctaccattgatggacatttaggttgatcctatgtctttgctattgtgaatagtgctgcaatgaatataagtgtgcatgtgtctttatgatagaacaatttatatttctttgggtgtatacccagtaatgggcttgttaggttgaatggtagttctgtttttaggtctttgaggaattgccacactgtcttacatgctaattaacactcccaccaacagtgtgtaagcattcctttttctctgcaacctcgccagcatgttgttttttgactttttaataatagccattctgactgatgtgagatggtatctcatggtggttttgatttgcgtttcactaatgattagtgatgttgagcttttttatatgattcttggccagatgtatattttcttttgaaaagtgtttggtcatgtcctttgcccaccacgagtgtaaccaattctatcttttctagaaggtgagaagaacggagcaaagctaaaactgaaattggtaaagaaacagcagccattcagatcagctgagagaaggggatgcttgatattttgtggtttggacagtgttcctgttttgtctctgtgcaggcataattacagagcagtcttgtttctatctagatgcatcagagtcacagacaggcctttgttgttgttgttctgtgaacattgttcaccttcaacaggagaacatcatgacctaacagtgcattctagacaagctgctagcaacaccaagacccagttgttactgttaggccagctcccagctgttagaggctgctttctctttcttacatagatgaggaacttcagtgaagtctcttccagcaatgaaagactgatcaaatggctttcactctgtgaccctccgtttccttattttcaaaggattttaattgtactggccacatagtgctcttgtgtggatttgatgagatgttatctataaagtatcagccagtattattatctaggggttagcaatatggactcatcctccaaatatcagagttctgtgttgggactctggattactacttctgatcatggttgtgcagacacagggggtgggccatgattggcttaatccccaccagctgaactggcttccagaaggtataaagggatagccactggattttctccccttttgttccctttggaaggtggacatttagggattaggatattcaaaagcaactgtgcatacaagggaatttagaaagtcactgcacaagctcagggaaagatgcaaattcagaaaagacctaagatgatcataagctttcattttaggttgattctagcacagatacatcttataacaataaacaaacaaaaaaaccagcaaaccctggggaatggggaaaagctgatttccagagttagcacattgtaagattcaaatgtccattttcaacaaaaaagtcacaagacatacatacaaagaaacaagagagtatggcccattcaaagaaaaaataaataaacaatacctgaggaagcccaggtggtagacttactagacaaagacataaataactgtctcaaagatgctcaaacagctaaaggagacatagacgaagacagaaaaatgatgtatgaacaaaagaagaatatcagcaaaaagacagaaaatgcaaaaaggaaccaaaaggaaaattctggagctaaaaatacaattaactgaaataaaaaattcactgaaggggctcaaaaacagatttgagcaggcagaagaaaaatcagcaaacttggtgacaggaaaatttattgagtctgagggacaggaagaaaaaagattaaagaaagctgaacagagcctaaaggatctgtgggacaccacagaggagaccaacatacatattatgggaggtccagaaggagaagagagagaaaaagaggaagaaagaattgtaattttaagaaataagattgaaaacttcccaaatttgatgatagacatgaatcaacaaatctaaaaactcaataaactccaagtatgaaaaacccagagattcaagctgagacacattataatcaaactgtaaaaagccaaagccaaagaaacaatcttgaaagcagcaagagagaagcaacttgttacattcaagaaatcctcaataagattattggcagatttatcattagaaaccttggatgccaaaggcagtgggttaatacacttgacatgccaaaagaagaagaagaaaaaaaagacctatcaaccaagaattctatagctacccaatctatcctccaacaatgaggaagaagttcagatattcctggataaacaaaagctgagggagttcattaccactagtccttccctactagaaatgctaaacgaagtccttcaggttgaaatgaaagagtgcagacagtaatttgaagacatgaagaaaaaaattaaaatctctgctaaaggtaaatacatgagcaattataaaagctactgttatcataatttgagtttataatttcactttttattgtctacatgatataaaataaaatggatgaaaacaattattaatcttcattattgggaaaacaatgtatataggtgtgatttgtgacactgacaacagaaaaggaatgacagaggccaggtatggtggctcatgcctgtaatcccagcactttgggaggcagaggcaggtggatcacttgaggtacctgaggtcaggagttcaagagcagcctggccaacatggcgaaatctcatctctactaaaaatagaaaaataaaattagccgagcatggtggcagacacctgtaatcccagctactggggcggcagaggcagcagaattgcttgaacccaggtggcagaggctgcagtgagccaagattgcaccattgcactccagcctgggtgacagagcaaggctccatctcaaaaaaaaaaaaaaagaaagaaaaaggaaaaggagtgacagagctatataagagcagagtttatatatatactatcgaaattaagctggtataaatgtaaattggagtattataattttaggttttatatataatataatctcctctataaccacaaaataaaaagctacaaaatatacacaactggaaatgaaaagagaatcaaaacatttcgctacaaaaaaaaaattaaacataaacagtaatggagaaaatgagggacaaaaagccataaggtatatagaaaacaagtagcaaaatggcagtaattttgctgatagtcatttctttaaatcaagatggagatttccagaatgtatttttaaaaaccacccaacaatacgctgtctataaaggattcatgttagatccaaaggcacgaatatgttcaaagcaaaagatatggaaaatgatattccatgcaaacagtaaccaaaagatagcttgagtggctatgcgaatatcagacaaaatagactttaaatcaaaacaatttacaagagacaagacagacattacaaattaataaaaagttaaatatctcaataagatgtaacagttataaacatttctgcacctaataacagacctcaaaatataaagcaaaaattgatagactcaaaggagaaatacacagttctaccataatagttggagagttcaaaatcccactttcaataatggatagaacacacagacagaaagtaagtaaaaatatagtggacttgaacaacacaaaaaccaactagacctaacagatacatatggaacactcacccaattaaaaaaaaaatccaagtacacatgagacattctctatgatagatgacatgttgaggcataagttaaatctcagtagattttaaaatacctatcaaacgaactcttttctttgatcacaacaagataaagttagaaatcaataatagaaggaaaaatgaaaattcacaaatatgtgaaaattaaacaacattctcttaaacaaccaacaggtcaaagaagaaatcacaaaggaaatcagaaaatacttagggacaagtaggaaagaaaacaaaatataccaaacttatgagatgccccaaaaacagtgctcagagggaaattaatagctattaatgcccatgtaaaaagaataactatctcaaattaataacctgacttacatcttatggaactagaaaaagtagagcaaacaaaacccaaagccagcagaagaaaggaaataatagagactagagcagaaactcataaaatagagaaagagaatagacaaaaaaatctgtaaaaccaaaagttggttttttgaaaagattaacaaaattggcaaacctttggtgagactgatgaagcaccaaagagagaagacgcaaataactaaaatcagaaatgaaagtggcaataccactaattttaaaccacctagcaaagaaaaatcttaaaccagatggcttcatgagttagttcaaccaaacatttaaagaagaattcacacaaataattttcaaacttccaaaaaattgaagagaaggaaacactttctaactcattctgtgcagccagtattaccataataccaaagccaaataaagaaatcactagaaaagaaaattacagactaatatcccatatgaatatagatacaaaaatcctcaaaaaaattagcaaatcaagttcattagcatattaaaaggattactcaaatatccaagtatgatttatgcaggaatgcaagggtggttcaacataagaaaattaatcaatgtaatacatcacattattagaatgaaggtaaaaaacacacacatgatcatctgaattaatacagaaaaggtatttgacaaaattcaacacaccttcatgattaaaaaaaaaaaaacagaaaactaatcatacagggaaaattcctcaatgtgataaagggtatttatgaaaaactcacagctatcatcatactcaatggtgaaagattgaaagctttccccctaagatcaggagtaagacaaagatggccattttcaccatggctattgaacactgtattggaagttccacccagagctatcagacagaaaaaggaaataaaagtcattcagattggaaagaaagcagtaaaactatctctattcacagatgacacgatctatgtatagaaaatccaaaagaattcacaagacagctactacagttaataaacaagttgcagggtaccagatcaacacacaaaaatcagtcatgtttctatgcaccagcactgaacaatccgaagaggaaattgagaaaacaatttcatttacaacagcatctaaaacaattaaatacttaggaataaatctaaccaatgaggtgaaagacttgtacactgaaaatgacaaaagattgctaaaataaggcctggcacggtggctcaagcctgtaatcccagcactttggaaggccgaggcgggcggatcacgaggtcaggagatcgagaccatcctggctaacacgatgaaaccccatctctactaaaactacaaaaaattagccgggcgtggtggtgggcgcctgtagtcccagctactcaggaggctgaggcaggagaatggcgtgaacctgggaggcggagcttgcagtgagctgagattgggccactgcactccagcctgggtgacagagcaagactcagtctcaaaaaaaaaaaaaaaaaaaaaaaaagattgataaaataaattaacaagtatctaaataaatggcataaatggcaagatgtgttcatggatagaaagacttaacattaaaaatgtcaatactacccaaaacaatctacagattcaacacaatgctgatcaaaattccaacgtcttttcccaaagaaatggaagcagatcctcaaattcatatggagttttaaggggcccccaataaccaaaacaatactgaaagagaagaataaagttagaggactcacactttccatctgtgaacttactacagagctatagtaattaaaacatatggtacttgcataaggataggcgtatagatcaatgaaatagaatacagaaccgagaaacaaaccctcacatatatgattaattgatttttgacaaggaagccaagaccacttaatgggaaaaggacagtgttttcaacaaatggtagagggaaaactgaatatccatatgcaaaaaaatgaagttggacccttctaccacatactaaaattaaaatggcccaggccgggtgcagtggctcacacctatgtgagcactttgggaagccaaggcaggtagattacttgaggtcaggagttcgagaccagcctggccaacatggtgaaaccccatctcttctaaaaatacaaaaattaacccagtgtggtggcatgcacctgtaatcccaaatactcgggaggctgaggcatgagaatcggttgaacccggcaggtggaggttgcagtaagcggagatcacaccactgcactccaacctgggcgacaaagtgagactcagtctcaaaaaataaaatgaaataaaataaagtggctcaaagactcaatttaagagttaaaactataaaactcttagaagaaaatattgttgaaaatcttcatcacattggacttggcaacaactgcataaataggataccaaaagtacaaggaagaaaaaatagtaggtaaattgaacttcatcaaattaagaacttttgtgcaccaaaggacactatcaagaaagtgaaaaaacctggagaatggaagaaaatatttgcagatcatatatctaacaagggattaatattcaaaatatatatagaactcctacaacttgacaacaaaaaaacaaacaacccaattcaaaaatgggcaaagtacttgaatagacacttctccaaagaagatatactaatggacaataaattcgtggaaatatgctcaacatcgttagtcattggggaaatgcagattacaaccacaatgagatgccacttcacactaaccaggatggccataatcaagaaaatggataataagttttggtggggatgtggagaaattggaatcctccgtgcattgctggtgggaatgtacaatagtgcagtcattggggaaaacagtttggcagttcctcaaaaggttaaaaatagaactaccaagtcacccagcaattccattcttaggcatatattcaaaagaaatgaaagcagatatttgtacaccagtgttcacagctgcactatttacaatagtcaaaaggtagaaacaacctaggtccatccacaaatgaatggataaataaaacgtagcatatacatacaatggtacactagtccgctgtaaaaagaaattttgatcttactgcatgctacatggcttcgacatactacaacatggatggaccttgaaaacattattctttgtgaaataaactagacacaggacaaatgttagacgattccacttatatgaggcacctagaatgggcaatttggtaagcaaagtagaatagaaattactaggggcacaggtagcagggaatggggagttactgtttaatggtcacagagtttatgttggggatgatgaaacagtttcggggataaagagtggtgattggtacacgacattgtgaatatacttaatgccactgaattttacacttgaagtggttaaagcgataaatattatagtttgcatattttatcataaaaatatttttttaaacgatgaagggacgtgaacgggttgaaattttataaaaagtggccagggaaggtgtcactgcaatggtgtcctacaggaggaggaagatcatgtggacatctgcgggaagggtgttctggcagagggagtagcacgggcgatggctctgaggactgtgagaagtatagttggaaacagcgaggaggccagggtgtccgaagctgagtaagccagagagagtgggaggaggtgagataagagggggaaggtcagtttctgctgagagtgaggaggagccacaggagggctgtgagcaggtggacgtgatctggcttgagttttaacagggccagtagaacaaagcacgcctgggtaccgaaaccagccactggccagttggcaacctgggggagtctaacgcgaggaagcgcccagggttcccccaggatgcgctttccctcgccgccacctggagacagcagagtcacgcccagcgctgcgcaggctgatcgccgcgccgcgcccccgccctcggtcgcaggtggctcgttccgggaattcctaagcggaaaccggtcccaagccccgcgccttcgctcggcccctttaagagccagaatttccggagggctgacccgggggctagggatgcccaggggccgaaccacaagttgggaacgggtgggggaggtggcgaaaacttccgaagtggaattccaacttttcctggccctgattccccttgggcatccctgagggggcagagcttcccttccggggactttagagggttcctcaggtcatctaactgggagacacaggaggcccgaagcgccccccctccacccggtccggaggaaccccagtggaagtggagaagtcaggcgccaccaacaagcctctcccagccaggactttgcttagactcgctcctcccggcagggcgcacctaggcgggtccatcgccagccggggagaggggtttgggcagggagggaacaggtgcgcggcgggacccgccctatctcaacaggtgaatcgctccaagtgggtctcggttgcatggatctcggtgcgcttggtttggccggagcagatgggggccggaagggacctgtggtccgcaggcgccctcccagcgggccagtcacttggttcgggccctgggggacggagcgcacctgggtcagcccacttccggggagggaggcagaggaacccctccccgccgctcacccctaagcccagccctcggctcccacccttgtgtacctgggccgaaccattcaccggagcgcgcagcgggtggagtgtggctcggaggaccgcggcgggtcaagcacctttctcccccatatctgaaagcatgccctttgtccacgtcgtttacgctcattaaaacttccagaatgcaacaggacggacttggagtagggacaaggaacggaagtgggaaggggaggagcgtgcacccctcctggccttggtgcgcgccgcgccccctaaggtactttggaagggacgcgcgggccagacgcgcccagacggccgcgatggcgctgttggccggcgggctctccagagggctgggctcccacccggccgccgcaggccgggacgcggtcgtcttcgtgtggcttctgcttagcacctggtgcacaggtacggggcacggggcctctgacgctgcggaacgccggagggaactgtagagggggatggatggagttggaggcggcgggaagcgggaagcgggggtctcagaggctgggaccttccgatcccctgggtcttgggcgatctgttgcgcgcgggagtgagaggaattccccatttgtgccggggagcgctccccgcgcccttatctggaagatagcaggaagtgaaactccctggacggtgagacccggagcggcagggagaatggaactctttgtggggagggagtggaagaccgcccgatctctgggaaaagaaaagccgggatgggacttgggcgcacccggggatttctaagttttggagtaacggggagagggcacgggagggctggatcagacgcttcctagagggacagagacgaaggaacaatgcctaggcctcgggtgggtgtgggactggggactccccatcccccgcaccccacccacctcccgcgggctccggattatacgtgcgtaagagtctggtgggatggatttacggacttgaaaccgacttctgctggcaggctttcacctggatgggatatttgggtggtgatgaggtctttcccgagacacttttggttcagtcatttgaaatgactttagagtagggtgaggtggtgggaggctgatggagatattgtgggggctttagtccctccatggcaaagcagttcaggcaaacaactccatggttttccctccaaattcaaaaggccccgggtaacctggaatccttcgtagtcggttttgaagtggggccttgggcgctgggggcatcaacatggccatctgggcttgcctgcccaggccacacagaggccccttgttgtgggtgaatggcaaagggaagaggggactggtgtggttcagaggccacaggctgggaagagggatggcgggcgagtccaaggaaactggccgtgtcaccgtgcacctgccacttcagccccacgggtctataaaatgggcatgattatcgtggctacctcactggtcctggcaattaaggaacaatgtgtgccaggcactctgtaaaccacatacttgcgagtgtcaagctggtgacaggtggcgttcctgttgaagcacctccctgagctcacagcaacccttgctgtctctcctcttgccctcagctcctgccagggccatccaggtgaccgtgtccaacccctaccacgtggtgatcctcttccagcctgtgaccctgccctgtacctaccagatgacctcgacccccacgcaacccatcgtcatctggaagtacaagtctttctgccgggaccgcatcgccgatgccttctccccggccagcgtcgacaaccagctcaatgcccagctggcagccgggaacccaggctacaacccctacgttgagtgccaggacagcgtgcgcaccgtcagggtcgtggccaccaagcagggcaacgctgtgaccctgggagattactaccagggccggaggattaccatcaccggaagtatgttgggcagggcagggggatgaggctgggcttgcccgggtggtgggactggcgtccttgtgcgggacctggagtccccatctgaaagctcttgagtgccagtgtctgaaaggaccattgaagggagcaattctttttttttttttttttgaagatggagtcttgctctggactccaggctggagtgcagtggtgcgatctcagctcactgcaacctccacctcccaggttcaagcaattctcttgcctcagcctcccgagtagctgggactccaggtgcgtgccaccacgcccagttaatttttgtatttttagtagagatggggtttcaccatgttggccaggctggtctcaaactcctgacctcaaatgatctgcccgccttggcctcgcaaagtgctgagagacaccatacccagcctaaagggagcgattctattctactattcttccttctgctaatccttccattctttaatttaataacgaagattttttgagtacctgtcatataccaggtgctgttctgggccctgggaatacagctgttaacaaaatcatcaaaccacttccctcgtggagcccacattgcagtgagagagacaaacacgacacacactctcaagtccttgaagataaagaaaactgggtaacggagagaagaggccagggtttgttctataatcattaataacacgagcagtaagaagtaaaatttatctaagtaacaacttataaagggtctactgtgtgctaagctctcatccaggttcccaaggattaactcagaccacacagtaattgaatagattctatcattgtcatcttacagaggcccagagagagaaagtgacttgcctagtgtcatagctggtaacggggctgggattctaactcagccactttgggtctagtggccaagctcctaatccctttgcttgcctagggtggtccgcagaggactcacagaggagatggcaggagtgaactgcaggggcaagagagcttaatggagaaagcctgtgacatgccaggaactgcacacatattctcccattgagtcctctcctctaccctcctgacagctgaggcacagagaggttaccttgttcaaatgggtgcataggaagtcaaagtctggagctggggtttgaacccaggcagccctgagaaccttgttctttttttttgagacggagtctcgctctgtcgcccaggctggagtgcagtggcgggatctcggctcactgcaagctccgcctcccgggttcacgccattctcctgcctcagcctcccaagtagctgggactacaggcgcccgccactacgcccggctaattttttgtatttttagtagagacggggtttcaccg[140 bp omitted]gttgggactaagtaaggggcagtcattcattcattcatttggtatttatcaagcatcgactatgtgtcgttggtgctggggatagaggtgattgggatggctgaagtttctgtcgtcaaggagatgacattctggtggagtgagactggcagtaaataagcagataaagaaagagtatgagaatttcaaagtctgggcacggtggctcacgtctgtaatctcagcactttgggaggccaaggtgggtggatcacctgaggtcaggagttccagaccagcctggccaacatggtgaaaccccgtctctactaaaaatacaaagattagccaggcatggtggcacatgcctgtaatcccagctactcaggaggctgaggcatgagaatcgcttgaacccaggaggcagaggttgcagtgagctgagatcgcaccactgtactgcagtctgggcgacagagtgagactctgtctcaaaaaaaaaaaaaaaaaaaaagactccgtcaaggtataagaatgtcagagagtactaagtgttgcaaagaaaataacaccaggctgggtgcattggctcatgcctgtaaatttcagcactttgggaggccaaggcaggaggatcacttgagcctaggagtttgagaccagcctggacaacaaaatgagaccccatgtctacaaaaattttaaaaatttaaaaattagctgggcatggtggcatgtgcctgtggtcccggctgctcaggaggctgaggtgggaggattgcttgggcttgagaggtcaaggcttcagtgagtcatgatcgtgccactgcattccagcctgggtgacagagtgagaccctgtcttgaaatgaaaagaaaataggctgggcgcagtggctcacacctgtaatcccagcactttgggaggccgaggtgggtggatcacctgaggtcaggagatcgagaccagcctggccaacatggtgaaatcccatctctactaaaaatacaaaatttagccgggcgtggtggtgggcgcctgtaatcccagctactcgggaggctgaggcaggagaatcgcttgaacctgggaggcgaaggttgcggtgcgccaagattgcgccactgcactctagcctgggaaacagtgagactccgtcttaaaaaaaaaagaaaaaagaaaatagcactgggtgatgtgctacatggaatgacttgggctgtgaatatgatttgaggagggcctgggcctgggccttacagaacctagaaggcagagaggaaggggaggggcagggtgccagggatgaaggctcacgtacctcatgtcttagtgtgtgttcactgtcttaaacaagaatttaaagttgggcatggggcagagcggggaagggagcatccctttgcagaccccaagaagccaggaactggagcacattctgctagaggatcgatgggaagcagggttccaggggctgagcctatgtcagtcctgtttcagaggaggcaccaggcttgcttgccctgaatttctgtgggcagctcagccatgagcatcctactgttattgaggtcacagggctgcttaggccccctcctctctaacccagggattgtgcctgcctggaccaggcgtgactgctaagcttctgccaggacaagccaaatactgagggtgcttcctctgctggacgcaaaagtccaggatgaccccccaggctctgtctcggggaaggggccctgcatgctccaggggcctcacaggcctgggtctttcaaaccacccccacctgggcctgtgtttgatcaaggccctgagtgtaaacatccattgtgtgtgtcctttcaggaaatcccatagccataggagcttcctctgtttcagctttgaggatggggaaaagtggactccccgtggtgttcctagggtcacccactgtgctggggtttttctgttgttgttgttttttttctgttgcccaggctggagtgcagtggtgcaatctcagctcactgcaacctctgcctcgcaagttcaagtgattctcccgcctcagcctcctgagtagctgggattacaggtgcacaccaccacacctggctaatttttgtatctttttggtagagatgggatttcgccatgttggccaggctggtctcaaactcctgacctcaggtgatctgcctgccttggcctcccaaagttctgggattacagatgtgagccaccatgcccggcctatcctggtttcaaaagtgaaaatagtcctggataaggtagaaggctgtccactccaggcatccctccggtccggtggctcattccctgctttgtccttccatgctttgggtgatggaccagcacctggacaggaggccctgttccacctcctcgggctccttggggtccaagtgcccccacctccagctgcactgcagcagagagcccatgggacctctgaaatcatgaaggtcacctttgcggtgtataaagaaggaaccagaggttggagatgtggaggaggcctggctgctgttcccactggagacctggcatcttctccccgacctaaaacaatgaaagcagtgctcagcccggatgagatcacggccagcccaagaccaggaacagggtacgccctgcaggaagaaggtgtgcccagaccttaggatggatcaaaagaagccggaaaactatattttttgtgagttttgaaaatgtcagacaggtcaaacaaaacacagtgaggtccagcctcggcctacaagatgccagatttcaacccctggcctatatgatctgtttgccatggcaggcggttcctgtccacctcttttgtttatagcagggaccagctcttgagctccagtgttgaagaggcacggtcagggtctgatctgaagacactggtggctcatgcctgtaatcccagcacttcaggaggccgaggcaggaggattgcttgaggacaggagctgggagaccagcctgggcaacacagtgagacccagagactacaaaaaaataaatttagcggggcatgatggcacaccctgctactctggagatgggaagattgcttgagcctaggagttcgaagctgcagtgacccatgatcgcaccactgcactccagcctgggcgaccaagctaggccctctcaaaaaagatacaggtggaaaaatgatggacgaagagggcattgtggcaaacctggggatttaggagaacctagtttggaattctatgaggattcaatgaaagaatgtgtgtagaggggccca[131 bp omitted]gcaagatcccatctcaaaattaaaaaacaacaccaacaacaaaaaaacagtggcttagatgcctgatcattagggtaagtcgtgtcctcaaccccttcacatctgctctgaaggtcaccatatccggaagccttccctggcctccttgtttaaaatggcacagcccccactccacgcctggcactctctgctgtccctgattcgttttctccatacagcttatctttgtctgatatgtgacatagttaacattttatatttgtctttctttcctagttagaatctgaactctagaagggcaagggcaaggatttataactcaaaggttccgggcttaggcctcttttatattcttgattttgaggttaattaagagctcaggcctagcgaggtggctcatgcctggaatcccagcactttgggaggcccaggcgggcagatcacttgaggtcaggagttccagacctgcctggccaacacagtgaaaaacctgtctctactaaaaatacaaaaattagccagttatgttggcaggcgcctataatcccagctactcaagaggctgaggcaggagaatcgcttgaacccaggaggcagaggctgcagtgagccaagatcgtgccactgcactccagcctgggcaacagagcgagactccatctcaaaaaaaaaaaaaaaattaagagctcaaagagtttgttttcataggcagcagaatgagaaaagtttacaaaatagtttaaatgacaataaagtcattatagattaacataaataaaataccttttatgaaaaaaataatcattttctgaaatcagacaaaacattgtgaatgagaaggtggcatggttttatttttttgcaagtctccgaagcctggctggatagaagagcctggcttctcagagctgcttcagtctgttgtgatatctattgtatgtcacgtagcctctggaaaactccacagttagtattgttgggaaaataactttgacctcaggatctcctgaaaacgtcttggggaaccccagggtctagaggctgcagtttgagaactgttgctgtggtatcccaggtgtctcaaatactgcctagaacataggtggtactcagtaattattgttgaaggatgaatgaatgaatgaatgaatgaatgaatgaaagaaagaaagaaatgtgtctttgaatccagccatgtgcccagaatgatgagacagatgacaaaagctaagggactttagcatgaggagagggggttcgtttccttttttttcttttttttttgagatggagtctcactctactgcccaggctagagtgcagtggtgcaatctcagctcactgcaatctctgcctcctgagttcaagcaattctcctgcctcagcctccagggtagctgggactacaggtgcgtgccaccatgcctagctaattttttacatttttggtagagatggggttttaccatgttggccgggctggtctggaactcctgacctcaagtgatccacctgcctcagcctcccaaagtgttaggattacaggtgtgagccaccatgtccggccaagagggtgttcatttctgctccttgccaggtattgtgtcaggcactggggacccagcagtggctgagacagacagggctctgcctcacggagcccacattttcaccaggcaaaggatggtcggcccctaagctgggagataagacttcagcagttgggtgggggagccgtgggagaagcccagcccacagggggacagtgcaaatctagaaccaaggcgatggcaggggtgaggctggcacggtagctagagaccacgtcgtgccaagggccttggggaccatgggactatgggaccttagggaaggcgtctggaatgctgtagccagacactgttgcaaggaggatttttctgtagacatgaggccttccttatgaagaaagcaagggttctttcattcctgggggtgccaggtgctgtggactgcagcacgcgtggttgctgccgtcacagagctgtcatgcaggagggcagcgcgtccttgggaaggtggcaggcaggtcaggctaggaggaaagaggccgggaagctgagggcatttcctgcccgagatgcccaatgtagcctacttctgtccccagtggcttaaggcagagttgcctggtaggtgccctggtcccaccctggtgaaaggctgaaggtatttaattagtgcctgagaagcagagaggaaacaggatgtgccaaaacactttgatggatggtagagttaacaggctccttgcctgcagctgcttcagacaagagcgtccccaagccctgggcctgacctggaatgtggggatggaaggggagggggaggaaccaaggcactgggagggtaagtctctctctcccacatagacacacccactccttatgggtgcctgggcatctcctggtacctagaatctggcctgtttatctccacacccatccctggggtctacactaggccctgtgggtggcagttcacatcaggggagttctgactttggctctgagaggtg[135 bp omitted]tggcgaaactccatctctactaaaaatgcaaaaattagccaggtgtggtggcaggtgcctataatcccagctacatgggaggctgaggcaggagaattgcttgaatctgggaggcgaagattgtagtgagccgagattagttcgcaccattgcatgccagcctgggcaacaagagtgaaactccgattcaaacaaaaaaaaaaaaaagctgggcatggtggagtgcctgtagtcctaactactcaggtgggaggattgcttgagtccaggaggttgaagttgcagtgggctataattacaccactgcactccagccagggccacagagtgagaccctgtctctaaagaaagaaaaaaaaaaacaacctcaggctccgagggcaccattactgctctatactgaagagctgtgcagcttttccagacccgaaatgtcatccacaaaacagaagtgataatggtcctgcctcacagacttcttgcagtagtccaggtgtttagaacggggtgtaaaaggccgtgtgcccttggtaggaatctttgcatatgcatttgatcatctgcagcctgcccagcccactgcttgccccctcctgggtgtgctgggaaggggtctttggccctccaggggttaggtgccccagcctccaaggtgccctcacgccttttcatcccgactcagatgctgacctgacctttgaccagacggcgtggggggacagtggtgtgtattactgctccgtggtctcagcccaggacctccaggggaacaatgaggcctacgcagagctcatcgtccttggtgagtgggcctgggaagggggaggcatggcccttccttttgtccgcttctgttctgtctgccctcccctgtgtccgccctctgccctccagcttaccctctgggctctgtcgcctgctctgctctcccccaggctctgccagtcacttaggctcccctgtgccctgcaccccaggcagggaccactggcccacagtgcctccaatcacccaagccaaactaagagaagagtggagacaattggagactctgccttttcaaagtctcatttttaaaaaaaatccagacttggggtccgggtgcggtagttcatgcctgtaatcccagcactttgggaggccgaggcgggtggatcacttgaggccaggagttcgagactagcctggccaacgtggcaaaatcccgtctctataaaaaatataaaagccaggcgtggtggtgcacatgcctgtaatcccagttactcagaaggctgaggcatgaggattgcttgaacctgggaggcagaggatgcagtaagccaagatcaagccactgcactccagcctgggcgacagagtgagactctgtccaaaaaaaaaaaaaatccagacgtggtcagagtccatgggcagtgaatgaggacagttgatggtgtgcaaaatcgacccacctcttgctacatccccaaggcctcatctcacccgagtccctcgccaaagcacagcggttttgccgtgtgccctgctgggatggcgctgcatggcacacacactgtgtaagtttgagtgcagctgaaacgaagccgattccagacacccaggggcagggcggggtgtccgtgtggctgggaggcctccttgtgttagggggatgttgccatcggccaggtgccctgctgtaagccaacacatggagtcttgtatgacatgtgctctgcatgagtgatgccgctgggctgtacactgccatcttcacatgtgtgaatgagcacgtgactggggggtacttgggctgcaagacagagttcatgtgtgggggatggaacacgtgcaccagtgacccaggaacctctgcctgttcttcggtaaaatgcaccatttgcatcagcagttcccaaaattagtctccaggtctatttacactctaaaacattatcgagggtctccaagagcttttgtttgtttctgtgggttttatgtctatctgttgcttaacatattaggaattaaaatggggagattttccttttttttttttttttttgagatggagtctcgttctgtcgcccaggctggagtgcagtggctcgatctcggctcactgcaagcttcacctcctgggttcacgccattctcctgcctcagcctcccaggtagctgggactacaggcacccgccaccacacccggctaattttttttgtatttttagtagagactgggtttcaccatgttagccaggatggtctcgatctcctgacctcgtgatccacccacctgggcctcccaaagtgctgggattacaggcatgagccactgcccggccttaaaatggggagatttttcaagcccaagatacacaaggaagactgggcaacatggcaagaccctgactctacaaaaaattttaaaattaaccaggcatggtggcatgcacctgtgagcccagcttcttgggaggctgaggcaggagtatcgcttgcacccaggaggtcaaggctgcagtgagccgtgactatgctactgcactctagcatgagtgacagagaccctggctcaagaaacacaaacacacacacacacacacacacgcatatagtccattaggcatcagggcgatgatggcatcagggagcctgggaaactctactggacattcatgggagaacaagtgaaaaaggcaaataacatcttagtgttattctaaaatttcttcttttggccttgtggacaggaccacgctttgagagctgtgactgacatgcctctgtcctgttgcgagggcctatagtgccaagtgcatgagctctggggagggcttcgtgggtgcagagctgggcctgtggaggcccctcagacacaacactggtggggctcagagctccaggggcactcgagggaagacaagaaccggctctgagatgcgtgaatgtgacagtgcatgagtagagatggagaccttgtgggtcccagaaccaggactgcatatgactttcatatgtgggtatttttgccttcatgggtcccttcctgttttaaaaaaaatgtgtgattatgttgtcacaaagagtttattcctgtatattgtgttaatttgtgttcagatttgtaaagtaaaattaaaccatttcagccaggtgtggtgacacatgcctgtagccctagctacttaccccagaggctgaggtgggaggatcgcctgagcccacgaggttgaagctgcagtgagccatgatcacacccctgcactccagactgggcgacagagctgagatcctatttcgtgggccctaggtccctgtgcctgctggaacaggacatccctatcaccgtggttggagccctttggggtgctaagacctatgaatgagggaaacttagggtgcccaagctgaggtagagccctcagaaccccctgggatttgtattggagccctcgtggcataacacaggtggattatgcaatgggagtttcttacctataagcacccacatgtgggcgggtggagggtaggagccatgcactagggcttcagcccccagccccttcccgcttcagggcacaccttgcacttggccagcctggagctgggctttcgggggtggcacagcctgggctggctctggccagcataatctgtttctcttttgtccctccagggaggacctcaggggtggctgagctcttacctggttttcaggcggggcccatagaaggtacggggggtggatcctgagttgggcttctcgggagctcccatacatcacctactgcttctgactctagttagtatccccttccccactaaaccctgctcactgtggacccctcactaacctggcctgactgtggctctgaggcatctagtggtctggcgctgggcctaggctaggctgggctgaggagagcctggggtgcaggccagggctctgtgactggcacctgcggtgctcttgagggtgtggcgtctgggcagctggctctctctttggtctgggggctgcagtctgtctccctctgtgcaggctgcctcgttttctgccttgtgttttttgcacctgggggagggccgtaactggggaatggccgggatggtagaatggggagtgtgctgtgcccagcctctggcacaaaaaatccagccagggctgcaggttccttggtgagctttgcaaatcgtccccgacctcagtgctggctccgcaccatgtacccctgctgtgccgttagccctgttccctcccaggcctccgggctcagggcctgttgtctttctgcagactggctcttcgtggttgtggtatgcctggctgccttcctcatcttcctcctcctgggcatctgctggtgccagtgctgcccgcacacttgctgctgctacgtcaggtgcccctgctgcccagacaagtgctgctgccccgaggcccgtaagtgtcccgctcatggccaccctggtttgggcaacatcctgcatccaagggaaggaggtggccatccacctgcccccaggacagtggcgttggtctggagggtgtgaatttagccagtggggagaaagtaggctgaggagggtctgctgtttagattgtcgtttacttcctccaacttttagtttatttttatttatgttgttcttttcttttgtaagtataatccatacacatggtaaaaatgtccaacagtacaagatactagtcacatggaagtaaagccctctaaaaaaaccaaatcttggctaggcgcagtgattacgcctgtaatcccagcactttgggaggccaagacgagtggatcacttgaggtcaggagttccagatcagcctggccaacatggtaaaacccagttctctactaaaaatacaaaaattagctgggcatggtggtgatcgcctgtaatcccagctactcaggagactgaggcatgagaatcgcttaaacccaagaagtggaggttgcagtgagctgagatcacgccactgcactccagcctgggcgacagagtgagactctgtctcaaaaaaaaaagaaaaaaaaatgttaagtgaaaaagttaagaaaccaaacaaggtttacaacactacatgatttaagcaaaaaaaattttttttgttttagagaaagggtctcattctgtcatccaggcagtgcagtgcgatcatagctctctgcagcctcaaactcccgggttcaagcagtcctcccgcctcagcctctggagcagctgggactgtaggcacacaccaccatgcccagctaattttttgatttttgttttttgtagagacggggtctcagtatgttgcccagcctgatctcaaactcctggcctcaggtgatcctcccaagtcagcctccccaaagtgctgggattacaggcatgtgccaccatgctggccaatttttaaaaattttctgtagagacagggtcttgctatgttgcccaggctggtcttgaactcttgacctcaagtgatcctgcctcaggctcccaaagtgatgggattacaggcatgaactaccacacctggccttaaacttaagcaaatttttttttttttttggagacagtttcactctgtcgcccaggctggagtaaagtggcgtgatctctgctcactgcaacctccgccccccgggtttaagctattctcctgcctcagcctcccgagtagctgggatataggcgcctgccaccacgcctgactaatttttgtatttttagtagagacggggttttgccatgttggccaggctggtctcgaactcctgacctcaggcagtccgctcccccgcacccctaccttggcctcccaaagtgttaggactacaggtgtgagccaccatgcctggccaaatttaagcaaatgtttgaaaacacatacccacaggaatgctgcacattttacccagctactatgtctagggtcgtatctagcacaccagcatggctactgtggagagctgggactggatgtgagatgagagctaaaggggaagtaagcaaaccaagcaggggaaggtaagagaagacagaagacagagagagagggacctaactctatgagaggagtcagacatgtgcaattgaaaaagacttgctcctgtctctcttctgtgaatgtttgtgaatatcccaacgggacactttcacagaggagctgattgacgtggtcacagccatcagccttgggacaccagaccacagtgtgtacactaagtggcactgatggacacttcagcatccctctagctgctgtcccgtttcccctcctcggggaccacagctgttgccagtccttggtttccttcaggagggtgtctgggtagaccagcctgtgtgcacacagtccaagatacatgaacagtgaagtgccaggcaatccttgcaagcatgggcaggtggagagctgaggcctgcttgacaccttcctgctcagaagcccagtgagcagtttccctccctagggctcagtgtcatcccctataaaatggggcttatggcagagctcaccacactgggtgcatctggggatttggcgagctcatgtgcacaccattgagcatggggcccaacctatataaaatattctacgtctgtcagctgctgggcactgccactatcagcctcagtagtgactgagggacagggcaccagtcagagccctggtgcacacagagtgaccccagagaagcagccttccctctctgagtcctgtttccttctgttaggtcctgacttcatgggttgttgttagcattaaggaagtcgctggctaattttatagtcattgaagtcagtggtgtgcaacctggttcctcaaaggatcacttccctgaaaaaattccactgctccctggaggcttatgcaggccatcccatcccctccctcttgttgtgttcagctgacagctttttgctcagtgagtaagtgttaggtccatttcacagatgggctgcaaccaagtttgcagtgaacccactaagaccagagctagggccaggactaaatgctggtcccaatgccacattcccctgtccccacaccacatttcctccatccggagaccctgttaccccaacccagggccccattaactccctggcagaggccctgttacatctgctgctgccacagcctccgcccacccttcaggaggcagcaggtcccactgctgatgataaagttgcaggctgcctgagctaatgaaggggcttcctctaggctgtgcacttagtcttctgcttccaaaccaaatcagaggtgaggcaccctctctgggcccatctctctcctccattttcctgttggggtcccagggaggaagccacttgcctagggcccaggaattttgcaagcctcttgccctagggaggaaggaagggaggaggatcttaccttgaactgtcaagcctagagcctggtggggcaggcagaaatgggtgcagtccatgagttagaaacactagaggagacactttgctgcttggccggggcaggcaagttaattcccgaggctcctgccactgcatctcaatctggaaggtgaccaggtgggcaggacccacgtctcccagatgactcattttttctagaacaggggcttggctgccaaagaggatacttgatttcggcttgtggggacagtggtggacccagcatctgggctttatataaagggcagctttgttgccctgtaaacacacagaccatgggtggccacttcttccagtaagttagctggggagttggaagtttaggtaaaaccttttgattgacaaatgttggcgaattaccatgctgttaaatgaaacattgttctgccaccctggggctgtgggtgcctgcgtgcaccctctgaaaaatcacacaggaagtggggtggggtctctgtgaagctggtgtcccccagcctcagggatgctgcagaaatggaatgaggaccaacagggactcagatgtccaaggaagctctacagcggagaggacggcttgggaaggaggtccaggcccaggtccctccggaacccaatgggtatggggcagcctggctcctgcctcatcccccttctcctgttgattgtgtcctcacagtgtatgccgccggcaaagcagccacctcaggtgttcccagcatttatgcccccagcacctatgcccacctgtctcccgccaagaccccacccccaccagctatgattcccatgggccctgcctacaacgggtaccctggaggataccctggagacgttgacaggagtagctcaggtgaggccgggggaagcaggaacagctggtgggagtgtgctgggcatctggacactgaggggcaggggctggaaggaagagtgtcttgggagccgaggaggggctctgctcctggtgcgcggccactgacagccactctcccccagctggtggccaaggctcctatgtacccctgcttcgggacacggacagcagtgtggcctctggtgagaatccatcgtcccgaagttggatgtgcctgtaagggagaggggtgggccaggatccatcctcccaaaccgaccaccacccccctgtccctagaagtccgcagtggctacaggattcaggccagccagcaggacgactccatgcgggtcctgtactacatggagaaggagctggccaacttcgacccttctcgacctggcccccccagtggccgtgtggagcggggtaagcaggagccttggggtctgagggcttttaaggtgggggggtgaaacatgtctccctgatacctgccgcagggactcttggtgcaaaccctggaccccgggctcctccagcagtcagtgacaccccccttccctgcagccatgagtgaagtcacctccctccacgaggacgactggcgatctcggccttcccggggccctgccctcaccccgatccgggatgaggagtggggtggccactccccccggagtcccaggggatgggaccaggagcccgccagggagcaggcaggcgggggctggcgggccaggcggccccgggcccgctccgtggacgccctggacgacctcaccccgccgagcaccgccgagtcagggagcaggtctcccacgagtaatggtgggagaagccgggcctacatgcccccgcggagccgcagccgggacgacctctatgaccaagacgactcgagggacttcccacgctcccgggacccccactacgacgacttcaggtctcgggagcgccctcctgccgaccccaggtcccaccaccaccgtacccgggaccctcgggacaacggctccaggtccggggacctcccctatgatgggcggctactggaggaggctgtgaggaagaaggggtcggaggagaggaggagaccccacaaggaggaggaggaagaggcctactacccgcccgcgccgcccccgtactcggagaccgactcgcaggcgtcccgagagcgcaggctcaagaaggtgagggccgccctccctggcgtccagaccgtccctgggcccccagccggtccccgcggctcatacccttctttctttctcccttgcagaacttggccctgagtcgggaaagtttagtcgtctgatctgacgttttctacgtagcttttgtatttttttttttaatttgaaggaacactgatgaagccctgccatacccctcccgagtctaataaaacgtataatcacaagctctggagagaaccatttgttcggccgcgcggggcgggggaccggggctgctcccgtatgcgtctgtaaagcgccgcgtcccgggggcaccggagtccggggccgggaggaagagacccagcctggcccggcccgcgcccgcgccgccggccggagaacgtgccccgcgcagccgccgcccgcctgcgtgcgcgccccggccccgcccaggcgtgcgcatgcgccccggccctccgccttcgcgcaccgcaggctggccgtccgggacgcgcgcgcgctcctctccccttccagcccatcccccccagccccccaccgacctactttactgtctccaaactcgggcagcccacctggcccccgacgaccccagcccctgcaccgggtaccccgacgttccatccagacccgcgtttcaccagggcggcgcgcggcgacctcgcgccccgcggagccccgggctcgcgcgcgcccgcccgcccccggagacagaccagcgcgcgcgccccgggccgcctccccccagcgcgcgtccgccccggggctcgcgccgccgccgccgccgccgccgcgcgcgcgcagctcaagtaaaggaggaaaaaaaaaagggggaaaaatagaaagcggcggcggctgcagcagcgatccgccgccggactgggccaagccgggcggcggccgcgcgagccggcgatccagggcactggcggcggccagccagggcgggccgtgttcaaaaaaaaaagtcgcggcggcggcggctgctcagggaaggaggcctgagggccgcgtgcagcgggcgggcagctgggtgggctgggggcggccgcgcggcgtcccggagcctcgggccgcccggagccggcgggcgggcggaggcggaggcggcggcggctgcagcggctgcaggagcggcggcggctgcggcggcggcggcggcatctcctcctcacatgaccccactgtttgtccccgtgatcagcgcgagcggctcccgtatctcctccgtcccctcctgccgcgcggcgtgagcgccgggctcggggcccccccggccgcccgccccctcccctccctccctcccctcccctcccctcccccccgggccccgcgccccccccgcccccgccccccccatggacatgctggacccgggtctggatcccgctgcctcggccaccgctgctgccgccgccaggtaagatccccggcccggccgtgcccccgcgccccggccccggccccggccccgcggcctgcaggccggggccgccatgatcccgagcggccgcgggcccggctcaaaatggaggccgccggcgcgggggggacctggcgcctcccgcccccggcccccggcctcggcggcgcccccggcctcaggcgcggccgggtgggactggggccctgcagctgggcgcgggggcgggggcgcgggcgcgggccgcgctgaccctgctccctcctgtgcccctggcagccacgacaagggacccgaggcggaggagggcgtcgagctgcaggaaggtgagtgcttgccgggccggccgcgcccggggagggctgggggcgctcggcgcggccctgaccgtgccccgaccctcctcggccccaggcggggacggcccaggagcggaggagcagacagcggtggccatcaccagcgtccagcaggcggcgttcggcgaccacaacatccagtaccagttccgcacagagacaaatggaggacaggtgagcggcgggccgcgagggcgaacgggcgggcgggcgggcgcgccgggaaggctcggacctggccccagcgccggcctcgccgctctgccgccccctgcaggtgacataccgcgtagtccaggtgactgatggtcagctggacggccagggcgacacagctggcgccgtcagcgtcgtgtccaccgctgccttcgcgggggggcagcaggctgtgacccaggtgggtgtggacggggcagcccagcgcccgggccccgccgctgcctctgtgcccccaggtcctgcagcgcccttcccgctggtaggtgccctgccacccctgggtgggggggggagggagtggagaggggacactggctctgctcttggggagccccgggggtggggcaggtgtcgcccagcggatgctgccttcaggcctcaggctgcatggggccagatccctgttgtgcaccgtgaaacctggggacagtgctcttggaatttttttttcccgcaaaatgggaatgatgtgtcttaagaggaaagtttcttagagtgcgaaacggatttgctcagcaagtgatcgctgacctcccgccatgttccagggctgtttgaaacacaggacagaatgctacacgcagaaggagtccccactcctgttaattgcagagaatgcagtaaaccccaagcacagcaatgaggggacgggatggaggaacagagaaagctaagggtagcctctgccctcctactccccaggctgtgatccaaaatcccttcagcaatggtggcagtccggcggccgaggctgtcagcggggaggcacgatttgcctatttcccagcgtccagtgtgggagatactacggctgtgtccgtacagaccacagaccagagcttgcaggctggaggtgaggagtagaagtcagattggcaggtgggggaggcaacgggcccagcagggagggaagcccccccagccagttctgacttcaccctgccttgccactaaccccccactctccctgcaggccagttctacgtcatgatgacgccccaggatgtgcttcagacaggaacacagaggacgatcgccccccggacacacccttactctccgtatgtgcaggggacacctggagggcctggtgttgaaatggaaggaagaggggtttctggagtagaagctgggcagttagcatgaagtgggcacatggtgtaatgttttttttctttgcctgtttctgctgctctagtgcacataaagtatcatgtcttttgtttttgcagatggatttaccttgcaaagataattttcaaatctaatacttagcagatgcttgggcaaacagctctgcgataatacatgccccctttttttttcctcctcttgtagaaaaattgatggaaccagaacaccccgagatgagaggagaagagcccagcacaacgaaggtgaggacaaggtgtggctccgggtccccctgaccaccaccctcacaggctcagccagccctggagtgtggagtgacagagagagaagccactcctgggcaggccacaagtgctccagagggctttgctggacgctgtaaaggtagaaagtgagcaacgaggggagagtacagtgtcagaagtagagggacagggagtgtgaattggaactggccatttgttgacccggctggtgatcttgaattcatggcccacatctaagatggtggacttcacactcccatacggattgcctgccccacttgaaaaatggggctgaccgggctcacgtgggctgacctttccacgtggcagctgtcatgctcacatcccgcactcccatgcctgcctggcctccagaagtaggtctgttcccccagggagcacatctgagggagaaactgcatgaagttctgcctctggctacctaaggccggagcatcctgccctttccagaaacaccaggtctcacctcaggtcatttggccttcagcactgtcccgccccgcctgtcagtagccactgcagtgggcacagcactgtgcaagtgccaggagagtgcttacacccaaacaaccatcattcaacaaatatttactgcccgtgggttctgggctgagcggcacaggccctgtgccaggtctggagtctggcctggagcgtcagggaggctcaaaggcctgagggcttatgtctcatgggtctcatgggacattgatggggggtgggctggggtgacgcttccctagggagaggggagtgtgggtcaggttactttgtggggtgctggtttggttgtgggagaagttccatttagaatgcctcaggagggaagatcgggaaggcctcgaatgcccgagtgaggggctgaatgctgagtcctaaaggtggtgatgggactggggtctgtggcccaggtagttgtgttctgagcagctcctccctgagttcaggcgttcattcagcgcgtgcatactacgaccagccccccttttgcgtcctcagatatggcaatgcagcagatgataggacagacaaggtctcagctctctgtgcgcgttctggtgggagagatgggagtcacacagccgcatcaggcagtgcaggcagtcacaggcaggagaggaaagctggggaagaaggtggcgggtgatggcggcatggtagtgtgctctgaagggctcttcgagaggtgacattgaagcagatccctgaagcgacctgagggaaggggcctgttgagaacctcaggagagtcccgggcagagggaagagctagaacacaggccaggccctgagccagggccgccatggtgtgtctgcagaagagcagaattcaggaaaggaaagaggaagttggcgcagtggagggggctgcccaggccagatggtggaggaccttggaagaagtccccagtgtggctgtctgggctcctgtggttttattccagggtgatgagaagccagcagaggggtttgggttgtggaggctgttggcaagagtggtgggaaggggctgggaggtaggagaccatacgactgtcaggcctgagacagggcaggggttgggggaaatgtggggaggactccaaggctggagaataagggtttcgtgctgaactcccctccatgcttggaagggaaggggtgcatctgagcttggttttgagatgcagtgagtttgaggggcccccagagcagccccagccccacgacttacctgtggtggggcgtcagggtggttcttaatctccgtacctgtcttccctctgtgaaatggtggaagcacagccgccccgggcacctggtggggatgcagtgagtcttggtggccacacagtaaggcgaagagaggactcagaaccctcccaccccactctcacccccgcctctcccttagttaatctgactccaggcagccttgaaactttctcaccctgtgaagcagtcttcatcacctgcccacttctccagctccgtcctgtctccgctttcctgacttgcagagcatctgccccaatctgctcatcctcccagtaccctcagccatctggctcatggctctaccaaaacagctccacttccggtcacccgtggtgaccccattgccacatccactggcctcctttgctgtctgggctccaagcatctgatgctgcctgtttccctctgttcctttctggaatcttcctttctcctccatcctctctgattctcctgtgatctttgcctttcctaccccactgttaacagtgaaatttccagggctgtcccagttccaagtgagtagatgggggtgccggggaatctgtgttttccatcagctcttcaggtgatttgtcatagtggacaagcttgagaaactgctttggctgcgagtgtttctttttttttgagaagggggtctcactctgtcacccaggctggagtacagtggcacaatcacagctcactgcagccttgacctcccaggctcaagcgatcctcacacctcaggcttctgagtggctgggaccacaggcaggcgtcatcacatggggtaatttttttttatctgtagagtggaggtcttgctatgctgcccaggctcgtcttgaacttctggcctcaggcagtcctccggcctcggctacaggcctgagctgccacacccagtcttgctggtgtttcataaggtccggcccctcccgtcggcctcaggtgtatgacttgtgaggcccagcgatgggctcggaagctcttggtcagtatcccccaaactctgttcccccttgtaggtgttcctcttttttctttgctgcagaagagtgtgtgactcacaaaaagttgaggactgttccttgatgtcctcccaggcttcgcccaccacctggctcctggtaatgcaaggaactgtgtttccatccattcccttcctttcactgcaactccagccccacgttttgaactacctattcgagatttctgtctctggacatccctgtaatgcctcaaactcaactcgcccaaaagagaatgtgccatctcccgtctccaaaggctttcatgcaaccttcttctttgcagagcagcaaaagctacccctgtcacagctgcccaagccagaaactaagaccagagccgctttcaactctgccctcttcttcccttatggccacaaaccccaagtttctcttctgtggtgatttcagatccgcttctctcacttctttttccctccttcccaccacttcttggtactgcaggagcttatcccagagtcacagactcaaatgcctgcaggggcctgagggagggaggtgcacttggcatctcaggaaggggtgtgtggctgggtgtggtggctcccgcccggaatcccagcacttttgggattacattttggccaagacggacggatcacttgagcccaggagtttgagaccatcctaggcaatgtgacaaaaccctgtctctaccaaaaaaattaaaaattagccaggcctggtggtacatgcctgtaacagtcccagctacttgggaacctgtggtgggaagatggcttgagtccgggagacagaggttgcagtgagctgagattaccctccagcctgagcaacagacccagaccttgtgtcagaaaaagataggaaaggttgtggggggcccccagtgatctggggcatgtgtgcgctgcctgaagggtggcccttgcccagtgccttccccttgctgccctgtcagaatctagggccactgttgccagaaactctgagaagctagaaatcgagacttatgtgaaatctgatttttaggtgccagattagattgctttttccgtttcattgatttctactcttaatgttactaattcatgcttctactcacttggttttttgtttgtttgttgttttgttttgagatggaatctcgctctgtcacagtggcgcaatctcagcttactacaacctctgcctccccggttcaagtgattctcctgcctcagtctcccaagtagctgggactacaggtgcccgctgccacacctagctagtttttgtatttttggtagagacggggtttcaccatgttggccaggctggtctcgaactcctggcctcaggttatccacctgcctcagcctcccaaagtgctgggattacaggagtgagccactgcacccggccccttctactcactttggattcaatttgctaggtttcatgctttagcttccctggcacaccccaaccccagctttttaaggtaattctttttttttttttttttccaattttctactaaaatctttattttacaggattaatgtttcacagcagggattgagatgattcttaacctttctctttgcttaacaacatttagagttgccagttcactccagcatcactttagctacatcccactgggatatgttgtttttgttatcattcagtttaaagtgttttccaattttccttgtgatttcttctttgacctttctgttatttggaggcaggttgcttaatttccaaatatttgtgggtttttcagatatctttttgttattgatttttaatttagttctgttatggtcagagaacatactctgtatgatttcagttccttgaaattcgatgagacttacccgacgggcccgaatgtgtcctagcttggcggaagcttctggggcattgacgaggacaggtgtctgctgctgtcaggcagaatgtccccccaggtcagtgaggtcaggctggttgagtgttcaggctttctattctgatttttgttgttgttgtttacttgttccaccaatcaatgagaaagatgtccatgtctctcactatatttgtggatttgtccatttcttccttcagtcctggcaggtttcgcttctgaattttctcttttttttttttttttttttgagacagagtctcgctctgtcacccaagctggtgtgcaatgatgtggtctcggctcactacaacctccacctcttgggttcaagcaattctcgtgcttcagcctcccaagtcgctgggattataggcatgcactgctatgcctggctaatttttgcatttttagtagagccggggtt[136 bp omitted]tgtggaatgaacgtggccttggtcctaatgggtcttcctgtatttcaaatgtgccatgatggtcttccgaagccacaggctggacagcattaccgcctgctaatgtcagggcctggattcaagggcctgggactctggaggaggaggagatgcggtcctgacctgcgagcagagcacacaaggccttgacaaccgatctttacaaccttttcccacccctgcataccctgaaatggttttcaggccaccatttctgggatcttcccagctgcctgccttagagtctttctctcagaaaccagcccgaatgtttcctggatctctgaggattcatcccacccccattcccatgcagaggccatggctcggcgcctggcgttcccgaggcactttgtaccatcttcagtgatgacacgaatgcaatggggttagtgccacttgcccacagtggtgctgcgagtgcccatggggcgcaccggggctgcttccaccctggaccccagcctggcggagggcctggcacatagtagggcggggagtaggtgtgtaagaagtaagcttgctctggagaggatgtacctgcagccggcgcccagctctcgagaggactgtgggagggcagaggctgaaacgaggccgcctgccgagttcctccacagacccctgggcgaggagcgctctgctggggactgcgccagcggtgcctccaggcctggactctcagctccgctgctgcttttggccagagttcccaaaggcgggtgtggttgtctttggtgggaaggttcagcgcaccgcgatagtaataggggagcaagcactcgctgagcccagtgcagggcctggaccgtgctccatagcaagcactgatcttgggctattggttttggaggaaagagggagcacaaggatggaaggggccagggaagagaggtcacggtgggagaaggagagtccgcatccatcggagggtttgtcactcaggcctgagtgggaggcactggaggcagggagaggccagtcagcagcatgcggccacagcccagagaagccagaggggtttgctggtgggtgggccccagccttttcaagggaacggcaggtctggggagctgccgatctcggggtgtgagggtaacgggcaggctgtggcccacccctccttctcaggctcactggacccctgaccggtttcatcaccattatccaaggctttgaaaagaccccctggccttcctgccacatgtgccctagctatagggcttcgttcccctccacaaatggtgcagacagcatgagccaccctggcagggggctgggggtccgtggggtaggagttgggggtagctgagcgttctttcctgtccccacggtgcctggtgctggggcttggcagccagggttgggacagcctggctttagcaggtcctgagtcaggggtctcaggctccgcagcacacagtccccaggcaggtgtcaggatgggatgtggccagagaaaggcatgtgctctgtctggggatagctgccacccagctgacacagttggcatgagattgtggagttttatggagtaaaatcacaaatctgggttttttaagtaaaaccttctatgagttgccatctctggccttcaacataggatttgggtctttcctgggtgagctggtgctttgtgggccaggccctgggagctgcaagtaccagttgggatctgccattgccctgtggaaggattttaagcaggggtgaaacatggtcagacttggatttagagatgaggaaaaaaaacaaaatcacggtgccagagtctctggggagactggagaatgcagtgcaggggccgcaggagccaaaaaggggcactggtcctgcgaagagtggctctgtccatccctgccttccagtatgtgcccactgtgaccagagctccatttctcaaaagaagccagtgatgccaattaccatgagaaatttccttatttttaactgtcgattaaaatttgtacaagtatggtggggcaggcctgcaaaatgatctccaagtgcctggcctttgatgcccgtcctaaaagcatgtgtggcactggagggcccacgtttctttgttcctcttgagaagctggggtgggggccggctgggctcagggtgcggcccctcacttcccagggctgtggtctcggtggggcctgcactgttcctgggtgtccttgggctgagcctctgccctgtgaggacggccgctcaggcatgatccgtcagcgaagccgtggctgtgactctgttttccgcagtggagcggaggcggagggacaagatcaacaactggatcgtccagctttcgaaaatcattccagactgtaacgcagacaacagcaagacgggagcggtgagcaccccggaccctcagtgtctgcggtggtcccggcccccgacccttgcatgcagaaagtccaacagccatggggctcgggagtcatccctggggtggaggccggtgggcggtgcctgccctaaggctcctggtcccctcgccccccagagtaaaggagggatcctgtccaaggcctgcgattacatccgggagttgcgccagaccaaccagcgcatgcaggagaccttcaaagaggccgagcggctgcagatggacaacgagctcctgaggcagcaggtgggtgcggggcctggagcgggtcagggcccaggagccccagatgcaaggcgctggccctcagctcccttgacctccgtcgtgtccgccagatcgaggagctgaagaatgagaacgccctgcttcgagcccagctgcagcagcacaacctggagatggtgggcgagggcacccggcagtgacgcccgccaccaccacgcagccgccgccgcccacgccggcctctgctgcccccttccccagcccttagcacagagagggacacatgcccctcccccagctgcgtttttttatagtagatttttaacaaaaaacggggagaaataatgcatttctgtggatacagtgcccaccgccctcctccacttggaaacggtatcctccctgcccatccgtctgtctgtcgcccttctcccggccctcactaagccccggcacttctagtggtctcacctggaggcaagagggaggggacagaggccctgccacgtcccgctgcctcctgctctctggaggtactgagacagggtgctgatgggaaggaggggagcctttggggggccacccggggcctggacctatgcagggaggccacgtcccaccccacctcttgtttctgggtccctgctcccctttgggggtgtgtgtgtgtgttttaattttctttatggaaaaattgacaaaaaaaaaatagagagagaggtatttaactgcaataaactggccccatgtggcccccgccttgtctgcttgtgtgtttgtccatctcaggagtggggagggggcctggggtctgcagagctccacgaggcatggttctgctgttgtgcacatggctgtgcatggtccctgccagctgcaccacccattacccagtggttggttggatggatggaggaattaaggaatgaatgtcccctttgaggccctagacgtgcatgagggtgtggggagctggggtcaaggacatgtcccatgttggaggagaggcaggggtctccgtgtcaacagttcctgaaaacacaaccagcccctggccctgccctgctgggccaaagccctcccctctgcaccagccaatagtggggcctggccttgagcccctcacccccagggagggcagatggccagggcgccaagcttggcccgtcagcctgtcgccttgcaccaaggctctggcgcctgtgctgtgacccctgcccctgctgatgatgaaacctgtcctcagctgagatgcagcgatgcctggtagggctgggggctgctcctgtgtctccccaggtgagcacacccctattcactgggccctgcttcagcctgcagcacccttcaactcccaggagctgggcttgccactctgctcaccttgtggagctccatctgcctttcctccccaattcccccactccctgcactcgtctcttcccacaagagccctgtctccttttcctagctattcccatctgaggccatctttattcatttagtttttagagacagggtttcactctcacccaggctggggtgcagtggcacacaatcacggctcactgcagccttgaccaactacaggtgcgtagcaccacagccaagtttttgtatagatggggtctcgctttgttacccaggctgtgacaagaggagcctcccacgtggtgtggatgaggaggcagatggcagggcctgtgcatttctgtgcttgagtgggccttgaaagtggttcagcaaccaggaagaagtgttcattcctcgacaacaacatccccgggctctggtgacttggctgacactggatggccctggaatgaaaaaggcaaagaggcaaaatgtgcaagggcccatctggaaccaaggtttgttgatcccctgggccgtgtgcaccctgagctgggcctggtagtggaaaggaatgaaggcactgcagtcaggcagcctgggttcatcccccagctagtggtgtcctaaggaaccggctccccaaaaacatccctggcttgtagtgcttgccaatttctgggtgtcaagactcccactgctgctgatttcaggataccagcatgatgccactgaatgcagagtttcgagatgtgcatggtctgctatgttgagccaggtctagcataccgctgtgccctgctgtgttttaggggagatggggaaacctggtgggtaagagcaaaagccctggagtcaggctgtccaggctagaatctcagctctgcctctggctgagcaagcttgggccatgccctgatctctgccttcagtgccttttctgtaaagtgaaggaaatgagtgtccgacggggaggaggttcctaaaagggagcagggtctggggagcccaggcctctggggttgggtgactgagaaggcagcccctgaatacagagcagagctgaaggtggggcagtaagtgctgctgggagaacaggcagcacaggctgagttggtgcagaagtgagtcaacatatgtgccatcgtataaaatgtactcatcggactgtagatgttagctattactattactgctattttatgttttatagacagggtctcactctgtcacccaggctggagtgcagtcacacaatcatagctcactgcaacctcagcctcctgggcttaagcgatctgcctcagcctcccaagtagctgggactacagatgtgtgccaccacgcctggctaaatttgtttaaaattttttttgtagagatggggtctccctatgttgcccaggctagtcttgaacttctgggctcaagcgaccctcctgccttggcctcccaaattgctgggattacaggcataagccactgtgctgggccatattactgctgtcatttatggccaaaagtttgctcaaacattttccagttaccagagccacatctcaagggtctgacactgggaaaacaccacgtgcggatcgggcacacgctgatgcttgccctgctcagggctatctagtgttccctgccagaacctatgcacgtgtggtgagagcttaaagcaatggatgcttcccccaacatgccagacactcctgaggagcctggcggctgctggccatgccccgtgtgcatgtaggcgatggggaagtgagtggaggagagcggaaccttgattctgctcatcaaactgcttaaccgctgaagcaaaagggggaacttttttcccgatcagcagaatgacatcgtgatggggaaagggctccccagatggctggtgagcagtgtgtgtctgtgaccccgtctgccccaccccctgaacacacctctgccggctgagggtgacacaaccctgttccctgtcgctctgttcccgcttatctctcccgccttttcggcgccaccaccttcttggaaatgagacagagcaaaggggagggggctcagaccaccgcctcccctggcaggccccataaaagcgactgtcactcggtcccagacaccagagcaagctcaagacccagcagtgggacagccagacagacggcacgatggcactgagctcccagatctgggccgcttgcctcctgctcctcctcctcctcgccagcctgaccagtggctctgttttcccacaacaggtgagagcccagtggcctgggtccttagcagggcagcagggatgggagagccaggcctcagcctagggcactggagacacccgagcactgagcagagctcaggacgtctcaggagtactggcagctgaacaggaaccaggacaggcacggtggctcatgcctgtaatcccagcactttgggaggttgaggcaggcagcccacttgaggtcagtttgagaccagcctggccaacatggtaaaaccccgtctctactaaaaatacaaaagttagccaggcttggtggcaggtgcctgtaatcccagctactcgggagactgaggcaggagaattgcttgaacccgcaaggtggaggttgcacagtgagctgagattgcaccactgcactccagcctggcaacagagcaagactccatctccaaaaaagaacagaaatcaatgaagcaccgagtgacagggactggaaggtcctaattccatgggtatttacggaacccctacgccgtgtggagtcttattctagacagtggggacgaggccatgaacaaggtagatgagagaggagatttctccatcctggtcagggaatttgttaaagactgatgaaaacatgaataaataattgtgtctagtacattctattcgtgaatctcataacagacagtggtagagtgaccgtgacccattcgccacacagtagagtcacttttttggtttgttttttagagacagggtcttcctctgttgctgaggctggagtgcagtggtgcagtcatagttcactgcagcctcaacctcctgtgctcaagcaatcctcccacctcagcgtcccaagtagctgggacagcaggcacatgccacgggttgggggaccacaggcatggtcaaggggctggcagtcaagcaagtgtttcatgagaaagtgacagttgaccttcgtcttggagggtgagagatggaggcagcaaagacctaaggagaggacaagccagcatagcccagggtcaggctgaacaagaggagatggtgggacttggggataaggctgaggggtgggcagtccctaagtcttgtgggcaaccatgcagacactgatttttccttggaataaagaggaagcccccataagcttttttttttttttctgagatagggtctcgctctgtcgttcaggctggtgtgcagtggcatcatctgggctcactgcaacctccgcctcccgggttcaagcaattctcctgcctcagcttcccgagcagctgggattacaggcggctgccaccacgcccggctaatttttgtttttttagtagagacagggtttcaccatgttg[133 bp omitted]tggccatgttttaaaaaacttaatctgccagtcaggcaccatggctcacacctgtaatcccagagttttgggaggccaaggtaggaagatcagttgagcccaggagttcaagaccagcttgggcaacacaaccagaccccacctctacaaaaaattaaaaaattagccgggtgtggtggcgtgcacctgctgtcccagctactcgggaagctgaggcgggagcatcgcttgagcacaggaggtcaaggctgcagggagctatgactgtgccactgcactctggcctgggcaacagaggaagactctgtctaaaaaacaaacaaaaaaagtgactctgctgtgtggcaaatggattgaggggcaagaatgcagggaggtgtgttaggaggctggcactggcatccaggcaggggaaggtgatatcccaaagaagagtagcagctgtggaaagaggaggaggcggatctgggaggtttttttttttaggaaaagccgcccatgggaaggtgagcagaagcaagaaagcaaggcccctcctaagagtccatttgagctctgggtttaaaccacttggagaggagcaggttgccgggagccagtctcagaggtccactgggccccctgccatcctctgcacccccttctgctttcacagacgggacaacttgcagagctgcaaccccaggacagagctggagccagggccagctggatggtgagcgcaacagtgatgcctttcctagccccctgctccctccccatgctaaggccggttccctgctcacattcccttccttcccacagcccatgttccagaggcgaaggaggcgagacacccacttccccatctgcattttctgctgcggctgctgtcatcgatcaaagtgtgggatgtgctgcaagacgtagaacctacctgccctgcccccgtcccctcccttccttatttattcctgctgccccagaacataggtcttggaataaaatggctggttcttttgttttccaaaccagagtgtctgttgtcctttctctctgccgagtgtctgtgctaagagcttgtcctgaccctgccttgcaagcaccagtgcttggtgggtcatgtggggctggtgtgtcctggaggttgccaggaaagttggtgaagaaaatttgtttctgttctcccccttcatgttgcaataataggggatgaaagttaatgtttcctctccttgagatcttcctaaaacagctgtagaaatcagtgcctgtaaggcaagcttgtccaacctggaggccacatgcagccctggatggctttgaatgcacccaacacaaatttgtagtttcttaaggcattatgagatttttccgcaatttttttttttctcatcagctgtcattagtgttagtgtgttttatgtgtggcccaagacaattcttccagtgtggcccagggaagccaaaacattggacactgctataaaggttctcaaagtaagatccagggactccttttgtagggctcctgaaggtggaaactactaagactttttttttcctttttttttccttttttttctttcttttttttttttttttgaggcagagtctctctgtgtcacccaggctggagggcagtggcatgatcttggctcactgcaacctccacctcccaggttcaagcgattcccctgcctcagcctcctgaatagctgggactacaggcacgtgccaccacacctggctaatttttgtatttttagtagaggtggggttttgccatgttgtccaggctggtctcgaactcctgacctcaagtgatccacccgtctcagtctcccaaagtgctgagattacaggtgtgagccaccacgcccggcctacaaagatgtttatttgcctttttcaccctggttctctcatgagtatacaatggagtttccaggaggctctgcgacacctgttggcatcatcaccagatggctaatggattgtgtgctggtgtatctcacgcttttaaatgtcccagtttctagcccggtgcagttgcaccatccctgctactcgggaggctgaggcaggaggataatttaagactgggagttccagaagaagacctggtgtcaaaaaaaaaaaaaatggggcaacgaaaatgagagcaatacagctttcaagaatgggaggggccaggggtggtgattcatgcctacagcactttgggtggctgaggcaggcagatcacttgaggtcaggagttcaagaccagcctggccaacatggtgaaacaccgtctctacaaaaattagccaggcatggtggcatgtgcctgtaatcccagctagtcaggaggctgagtcaggagaatcacttgaaccctggaggtggaggttacagtgagccaagacaacactgctgcactccagcctgggcgacggagtgagaccctgtctccagaaaaaaaaaaaaagaagaatgggcaggaactcagttccttgtggaggtgaactatattcctatatgtttcacgtgcaaagtgtgtccttcctgagagaatacaacttaagatgctcctgtgtaacaatcccccatacctcgctcatctgctatacctggatggcctctgaaggccatgggcctcacaccttttggtcttaggacccctttacattctgagaaattattgaggactccaaaaagctcttgataaagtgggctatatctctagttgcctgatgtattagaaactgaaactgggaaaatatttttactgtttatttatttatttttgagacagggtctcactctgtcgcccaggctggagtgcagtggcgcgatctcagctcactgcaaactccacctcccagtttcaagcggttctcctgccttggcctcctgagtagctggaactacaggcgcccgccaccatgcctggctaattttcatatttttagtagagacagggtttcaccgtgttggccaagctggtcttaaacgcctaacctcaagtgatccacccgcctcagccactcaaaatgctgtgattacaggtgggcctggcctgcccacatttgatagaaacagacataggggctgttatttcactgtcttcttagctcccaggaagcaacagctctcacttgatggtaaagggcattggtcattcggcctcaatgttgggtgtgggcagggagtgggaaggcccaggctgggcgggagagggctccaagacacggctgccacacccaaggcaggtaaacctgactagaacttctgattttgtcaagagaaggtgggaattcctatttttattagagatttcttgctttgacagtattggcaactgagcaaagcaatttgtcttttaacatcaacattctgtgagccaaacgaagcccagctgggcgccagatcagtctggggcaccatcaatgtctgccttcgctttggaatccacagaggcttgtcctctgggaggggaggtttcctgaatgaaaactgaagggatagggagaggggagttgtggtgagcttggcctcttattagctgtaacatcttgcatgcatcttcttcatatccggagctccacctcctcatctgtattttttattttatttttttagtctgggtcttgctccatagcccaggctgaagtgcagtggtgtgatcatggctcactgcagtcttgatctcccgggctcaagcgatcctcccacctctgcctcctgagtagctgggaccgcaggtgcctatcaccacgccccgctaaagttttgtattttgtgtagagacgtggatctggctgtgttgcccaggcgggtctcaaactcatggcttcaaatgatcctcccacttcagcctcccaaaatgctgggactacagttgtgagccaccatgcctggcctctccttacctttaaaagaacagaggcactgggcgtggtggctcacgctgtaatcccagcactttgggaggccaaggcgggtggatcacctgaggtcaggagtttgagaccagcctgaccaacatggtgaaaccccgtctctactgaaaatacaaaaattagccaggcgtgttggcgcacacctataatctcagctactctggaggctgaggcaggagaatcgcttgaacccaggaagcagaggttgcagtgaaccaagatcatgccactgcactccagcctgggtgacagaacaagactccatctcaaaaaaaaaaaaaaaaaacaaaaaaggaacagaagctaagtccatacaggacttagcttaactggctctagagctgctcaaccaagggaatgagtgtgaaattgctttggaaactgtccaatgcttcctcaatgtaaaggattcatattgacaggagagggtagaggcctccctcctggcaggtgggaaacctgaaatcaggaattacacttaatgacacggggtgctcttctctcctgagcaagcagttctctggggtggtcctagagagatgggagaacatgtaaagcagagatactcaaatttcagcgtgctcaaaatctcctggagggcctgcaaaaatgcagatgggtccaggctcagtggctcaagcctgtaatcccagcactttaggaagctgaggctggaggatcacttgaagccaggagttcgagaccagcctggccaacatggtgaaagcccgtctctactaaaaatacaaaaattagctgggtgtggtggtgcacacgtgtagtcccagctactcgggaggttgaggcacgagaattgcttgaacctgggaggcagaagctgaggtgagctgagaccttgccactgcactctagcctgggtgacagaatgagactctgtctcaaaaaaaattaaataaataaaaataaaatgcagatgaggctgggcgtggtggagcatgcctataatcccagtggtttacgaggctgagacgggaggattacttgaggccaggaattcaaggctgcagtgacctatgatggcaccactgcactgcagcctgggtgacacagtgagacgatgtctgtaaaacaaataaacaaataaactgcagatagctgggcctccagaatttctgattccacaggtgcaaggcggggcccttgaccttgcattttgagcaagctgcagtcctgtggaggactggttgtgaagctgacaccattgtctgagggcagcaaaggctcttggatggattgagcctcagctcccatctatgagagctttaagctttaagtgagagctccccatggccgagagcttcattctgaattcctgctgctaggaattcaaaactcacattgaagtcctaacgcctagtagctcagaatgtgaccttagttggaggcagggtcttcacagaggtaatcaagttaaaatgagacgggagaatcctaatccaatataactggtttcctaaatctgacagggtacagtgactcacacctgtaatcccagcagtttgggaggccaacacaggaggactgcttgagatcaggaattcaagaccagcctgggcaatatagtgagaccctgtctctagcaaaaaaaaaaaaaaaaaaaaaagtgccagtagtcccagttactattgagaggctgaagcaagagagtcgcttgaatctggagggtggaggtggcagtaaggtatgattgcaccactgcattccagcctaaatgacaaagcaatactatgtctcaaacataaataaataaataaataaataaataaataaataaataaacggcaaatctgggcaggggtgaatacagggggaagggaatgtgaagatgaagatgccatacagagaaaggcccggaacagatcctcacacccctcagaaggaaccaacactgccagcacttgatcttgttgatcttggaattcaagctcaattctggcagggttttttgtttgtttgtttgtttgtttgtttgagtcggagtcttgctctgttgcccagcctggagtgcagtggcgcaatctccgctcactgccagccccgcctcccgggttcacgccattctcctgcctcagcctcctgagtagctgggactacaggcgcctgccaccatgcccggctaattttttgtatttttagtagagacagggtttcaccgtgttagccatgatggtctcgatctcctgacctcgtgatctgcccgccttggcctcccaaagcactgggagtacaggtgtgagccaccgtgcatggcctcaattccggtttttaagccacccagtttgtgaaactttgttgtaacagccctggaaaactgatacacctgctctctcgtaaaagatcagctgatacggcagcaccggccactggatctgcgggtcagttgtccccttagacagggcacctgcccgccagtcacaggtcctgtcacccagccccttcctctcatgggctccagccgcctcgctcccacaggtctcctggagacccgagttgctgatgtcagcgactattgcgagtgctcctgtgggacactgtcctctccccagcaacagccttcagttcacacccagggaggagatggagccccacactgcaccagcacacgactccagctccaactaggtgggtgttgatgctgaaggctgtgacatgcaaataccccccaggatctccttgtcaccccgaccaccaccaccaaagcccaggcaccaggcccctctcttctccaggacccaggcattcaagccccgcccgactctcaatggtcctttgtcccggactgggaaaggcacgggcagagtctgacatcatgaagcctggggtgggggtgggactccccctccccctccaactcccccccagccccacaacgcttctctccctggtctgagggatttccccgcccctcaccccctgggttctcccttgagagcgaggaccccccctccccactgctctggcctgaaggaggacaggagatgtcccagtgaggctgaacagctcatggtgaaatcactgctgcactttgtcacgccacctccagctgccccgagcccccacccaccttgcaaaagtcatgaccaaggggtggaatctgcactcagagggtccttgcccaacttggtcagcacagtcctatgtgcaccaagcactgccccggggacagaagggtgcacatgacagacagagaggcagataggtttctggtgagcccctgcctctgagagctcctgggttagtgggaggcagaggcgggcagacctagggtgcacacgggccagcctgccaaggctacagaaggaaaggacagcattgcaatggaggggcctggctgatgggcgaagatgggaaagcttcccagggaagcggcacccaggctgctgagcctacaggatgggtgaacggcagccagtgccagagtggggagtgctatggggtggggactgctttccaggaagaatgagcagcaggtgcacaggccttgagtctgaaggtgccctggggctctggggaacacattcaaccacccacactgtttattaagctcaactgcctgccaggagcttgtctacgagcaaggatggattgagaatatccaagacgaagcttctggcctggtggaggtcacgttctcatgaaaggagttggtgaacacggaaggtcatttcagatggcaagaggaggtgacactgacgttgagggtggaaaggacctgtctcctcctgctgcccacctaatgttgccaccaagattccctgaggacaatgcctctgtccctcagcctgggacttccaaagagattagactgcccccccacccccgggacccagaatcagggtgtacagggatggaagatggggagagagcaaggcagccactcccgacccctccaggaaagagctaggagaacccaggcgtcaggctgcccagtccgagccccgtggtgacaagggcccctttgtgcccccctcccccgggggtagggaggagctgggccctggaggcaggcggcccctggcacccagggggaggggaggggctggcaagtgggggcctagaccctggaaggcaggggactgcgagctgggctggcggagcagaggtgcagaagcaactgagtccaagtgagtatggtggcagggaggccagggcaaggggagcagggcaccggggcagtggcacccagacgtgagcagggtcaggtgctctgggtgagggagcatcgctgtgcaccgctactgatttaggatgcaggagtgtgtggcttggggctgctttggggatgggctcggaccatcgctggggcagcgatggggctctgggaagaaaccacagagagaaaaaacaaagggccccccctcagcaccccttgtgggtgaagattttgcaggagaggtttccttggggttcccgagtgcggggcagatggggtggaggaggtctgcatctggccgaagaatggaaggatgtccaggtgatcagacacctgcaggctgcaatctgggaggtggatgggggcagtgggctgttagtgactgcattctagcacctgggcacatagcaggtgtgtgtgtgtgtgtgtgtgcgtgtgcgtgcacacacatggctgcccatgcaccttcctctgtaagcctcagtcgacttttcttcattaatccccactaaggacactttttatttttcgttacttttttttttttaagagacgggactctcactatattgcccaggctggtctcaaacttctgggcacaagagattctcccaacttggccttccaaagtgctgggtttacaggcgtgagccactgcgcccggccccaactacagaaactttttagatgcatttgtcctcatcccatccttcccttggcattttaatccaacagatctgctgtacatatgtttatggactgtggccacacacactgtaatagctgaggttgatttggcccccatcccgagaacttgttttccccgctgttaagagtgcatggtctacctgcttgtttcatgtctgcccgggcacgtgctcatcctcatctgcatctctctcctgtaccttcctgtcacaggtgcaagggcagcgtcggccaggtgtccatcggcgcgtgtctgagtggacgcgtctatagccatcctcagtgtgtgtgtgcagttccttgcatctttgttagcctggcatgcatgctgggctgtgtgtgtgtgtgtgtgtgtgtgctgaatgccagggctgtgtctgtccaggtgtgtgtggacagcagcagaggcattgcatgcacgccttgggaactatgtgagtgccagcccatccctgtgggcacaggggtccctgtgcctgtctgtgtgttcagggtcctgtctgggtgtctgtatgagtctccgctgcgtgtgcctgccccttctggctggggctacatctgtcacatttcatccccgcgattggatgtgtctgtgcatgtgtctctgtccgtgggaagagggcggtgaaggctgggaaaagcaattgcttggaaaccctggctgcaaccccaaggcaacccatggagcagcagggtgccaggggctcgctagcccccaccctgggccttcctggccctgctcaaaggccagccaggagtgcctgacccctttcttactccccacttaccctgaaagccccccgcaggctaaaacaccctctccccgagggaacaggactcttttgtaccggggaccagcttctggtgagggtgcggacaccaggggccgtctgtggggtgggagagggcggcaggaattcacgcggcatgtcgggaatgctgatactgtgaaacccagtcattgatggctctgggtccctgcccgccacccccaggccccggccgtgggacatctgctccctcactccactcgccacacccctcagtctcacccccgtaccccgatgcggtcgttcccccttccctccccacagttctctgacaccccagcttggagggagttgttgccagagagtggcttcgaggctgtgtgggagggtcccaggcacaatgggagggccacatgggcagcctgacaacaggtcacaacccatgcaggagatactgaagcgggggtgggttgggtgcctcaatcccgcccccttgcacctgagtgactcttgttgcatgcaggttgtctggcggcttcaggtggacccagaagacgtccccaactcagggagattcaggtgaggggcagggtaccaactctcttcccttgcttcagctttgcaatgctggccctgccttggctctctggttcttactttctggagatctccaggggcatcacggtgacaaagataatgatcagcacatcatcactgcatagagacaggacatgcagcaaagactgcagaccaactgtgtggccttgggcgagtcacttaacctctctggacctcagctataaaatgaggataatgcatcttcctcaaagagatccaatgagttaagacagcagaataagcagtgagggctggcacatggccaatgccatagaagggtttataattataagtaatagcagcaggctgggtgaggtggctcatgcctgtaatcccaacactttgggaggctgaggcaggaggatcgcttgagccaaggagttcaagaccagtctgggcaacacagaacatggcaagactcccatctctaaaaaaaataataataataaccaaataaataaactaaaataaaattagccaggcatggtggtgtgtacctgaggtcccagttactctgaaggatcgcttaagcctggcagattgaagctgcagttgagtgagccacgattgcaccactgcattccaggctgggtgacagggctgagaccccatctcaaaaagtaaaaagttaaaaaatatcagcagaccaggcatggtgatttacacctgtaatcctttgggaagccaaggcaggaatattgctggaggccaggagttgaagaccagcctgggcaacatagtaagaccccacctccacaaccatttccacaaaaaagaagaaaaattaactgggtgtggggtggcgcataccagaagctgagacaagaggataacacgagctcaggattttgaggctatagtgagctgttattgtgtcactgcattccagcccgggcaatgaaacaagaccctgtctcagaaaaataagtaaataaatgcataaataaataataatagcagcagcagctaacatatgaatgggccccttcctgaagcccagatggaacaccccctttcacttcccccagcctttaaccctctcctctccctttccagcgatcactcactcgctgtacagaatgatattcctcacggcactgcctctgttctggattatgatttcaggtaacggctgacaggtgctggggacctaaaggctttggcccctgagcaggttggaggtgggtccccgcagccccccggcatgtggttggggatgggagccggagggggtgatcgggtaggacgtgtccctgagcctcagctctcctgcttgcccgcagcctcccgagggggtcactggggtgcctggatgccctcgtccatctcggccttcgaaggcacgtgcgtctccatcccctgccgctttgacttcccggatgagctgcggcccgctgtggtgcatggtgtctggtacttcaatagcccctaccccaagaactaccccccggtggtcttcaagtcgcgcacccaagtagtccacgagagcttccagggccgcagccgcctcctgggggacctgggcctgcgaaactgcaccctcctgctcagcaacgtcagccccgagctgggcgggaagtactacttccgtggggacctgggcggctacaaccagtacaccttctcagagcacagcgtcctggatatcgtcagtgagtccccagcggttgtgcaggcaccgggagctggggcagcggggcgggaaggagtgtggccggaaggcctccccgcaccttccccagcaggcctggatggcagatctgggaggtgctgatttggctgggggtgcaaacctcaaggcccacgcagaccatgcagatgacagacatgaacaaagcagggccccaaaatagtcttgctgccctcagggggaaacaggtgctgctactcttttggaaacacctggagaaaggcagtggggccagggggtaggggcaaggctgctgggcccccactttagcgtggtgatcttgggcaagtgacttaacttccttgggccttggttttcttttccgtaaaatggggataagaacagcacttaaggcaatgagtgaaaagccatcagatgcccagagcagcacctggcacgtggcccccagctctggccaacagaaagcagggcggtggctgtcaggtgttctgaattttcaagataaaccagaattttggattctttggtgtaatctcctaattcttaaattttggttgctgattcagatttctttttttaaaatcctttaagccaaatagaatacagctatggccagacatggcaatcagaatagggcacactgcctgatttcagggatccccctgcctcatttctgagtggcgctgctgcttggagtcctcagcgctgagtccctatgagagagccgggttcaccctggtgcagaaagagactgcacaggtgcagtacacacacacaccactctacagaaatcacacactacacactgcacactctacctacacactacccacacaccacacactacacatacatcacacactacacaaaccacacaccacacactgctcctgctacctacacactgcccacacaccaaacatacacatcacaccaaacacaccacacacacacactacacaaaccacacaccacacactgcatacactacacacacacacactgcttggcgctgaggactccaagcagcagcgccactcagaaatgaggcagggggatccctgaaatcaggcagtgtgccctattctgattgccatgtctggccatagctgtattctatttggcttaaaggattttaaaaccacacaccacacacacaccacaccaaacacacaccacacacacacaccacattacaaaaactcaccacacactacacacacaccacacacaccacaccaagcacacaccacacacatcacacactacacaaaccacacaccacacacttcatacactacacacactacccacacaccacacacacaccacaccaaacacacacaccacacacacaccacactacaaaaaccacacaccacacactgcatacgctacacacacactacacacacaccacacaaacaccacaccaaacacacaccacacatccaccacgctacaaaaactacacaccacacactgcacatgccacacacacactacccacacaccacaccaaacacacaccacacacaccacacacaccacacactacataaaccacacatcacacactgcacatactacccacgtaccacacacacaccacacacctcataaactacacaccacacactgcacacactacccacacaccacacacactacacacactacacacaccacacacatacaccacacactgcacatgctacccacacaccaaacacacactacacactacacactgcacaaaccacacacacactacaccctatatacactgtacacatacatgcgccacccccacatcacaacacaaaccacacaccccacacacaacaaacatgcacaacacacgctacacaaaccacacaccacacacacaacacaccaaacacacaccacacacacataccacactacaaaaaccacacatcacacactgcacatgctacacacacacaccacaccaaacacacaccacacactacacaaaccacacaccacacactgcacatactacccacgcaccacacacacaccacacaccacataaactacacacacagtgcacacactacccacatgccacacactacacacaccacacactacacacaccacatacatacaccacacactgcacatgctacccacacatcaaacacacactacacactgcacaaaccacgcacacactacaccctatacacactacacatacatgcactacccacacatcacaacacaaaccacacactccacacacaacaaacatgcacaacacacactacaaaaaccacacactgcacacacaccacacagtacccaaaccacacgccacacaccacacactctacctacacactacccacacaccaaatacacaccacacaccaaacacacaccacacaaaccagacaccatgcacacaccacacacacaaaccacacactatacccaccacacactgcacacacacaccacatactacagaaaccacacaacacacactgcagacactacctctacaccaaacacacaccatgcgctacacacaaattacatgctacacaaaccacacacactacaccctacacaccctgcacacatacatgcactacccacacaccacacacataccacacactacacacagcacacacacaccacacatgatacaaaccacacaccgcatacacaccacatactacactcacaccacacaaaccacaccacacacacaccacacaccacacacaccacgtactacgcaaaccacataccacacacgacccaaactacacaacaccccacacacactgcacacatacatgtactacccacacatcacacacacaccacacatgacacagaccacacaccacatacaccacgctctacacccacaccacacaaaccacacatcacacacacaacacacactgcacacataccatacacaaaaaccacacactacacacatacatcacaaacacaccacatactacacaaaccacacacatcacactacacacatgcaccacacacccacaccacacacacacacacacacatacctacacacacacacactcacatgcccggcggagggtaaaccaagcaggcatgggagaggagagccgcttgggaagtgatgaggtgtggggagcccacgctgacgccagagccacagggtttgtagccagtgttacctggtgccagctgcagcctcagtttcttcatctgcaaaatgagcaaaattacagtcctcaccctctcgctttgcgggagggactggcaagttaaacgccgtcaagtgctctggccacgacactgtgattttcattacgatggcgctctggtggctccgtggagggctccggggtgaccaagaggaggaagggtaaagggaattctgaatctggaggcagggagcggaggcgataccgttgaggagtaccattgccagcaatggaggtggacaaggaggagggtgggtggggtgggaccgggaccgtagcccagtgctgctttctcagccctccctttccccgcctcgtatagacacccccaacatcgtggtgcccccagaggtggtggcaggcacggaggtggaggtcagctgcatggtgccggacaactgcccagagctgcgccctgagctgagctggctgggccacgaggggctgggggagcccgctgtgctgggccggctgcgggaggacgagggcacctgggtgcaggtgtcactgctgcacttcgtgcccacgagggaggccaacggccacaggctgggctgccaggcctccttccccaacaccaccctgcagttcgagggctacgccagcatggacgtcaagtgtgagcctgggtgcgggcggggcggggtggggcggggtggggcggggtccggggagggggtggacctggggatgcggccggaggcggggccgggccgtgatgggggcggggccatgcccagggccaggcagggattggggggttgggtgggacgggggcggaaccaggcagtcctggggcggggccaaggctgagggcggggccggacagtgttgggggcggggccgggctgggagagggcactgggccggttccccagcacctgctcactaacctcgctgtgtcgcgggccttagaccccccggtgattgtggagatgaactcctcggtggaggccatcgagggctcccacgtgagcctgctctgtggggctgacagcaaccccccgccgctgctgacctggatgcgggacgggacagtcctccgggaggcggtggccgagagcctgctcctggagctggaggaggtgacccccgccgaagacggcgtctatgcctgcctggccgagaatgcctatggccaggacaaccgcaccgtggggctcagtgtcatgtgtgagtggcccactctgtgcgtccacacgcccacctgcagccgagagataaagggaaaggggcctcatccagggcgagcatgggctgggtcccgaggggaccggccataaacagtcgaggccaaggtagacaggggggttgcaagtcaaggtgtaccttcattctttccacaagaatctggggaacacctgctctgcctcatcctccttccaggacaagacccaggcctgcctcctagggaagcctgttaactgcagcttcctgggggcagttcctggttgttctgggacttgatgtgggtctggtcccaggaatctgcgttttactttataaaatttttttggagacaaggccttgctctgttgcccagtctggaatgcagtggcaccatgatagcaccacttgccctcaaactcctgggctcaagcaagcctactaccccagcctcctgagcagctgggcctacaggtgtgcaccaccacactccaggctaattttcagattttttttgtaaaggtgggattttgctatgttgcccaggctggtatcaaactcttgggctcaagcaagcctcccacctcagcctgctgcgctgctgggcccacaggcaggtgccaccacacccagccaatttttctatttttttatagagacagagaatcgatatgttccctgggctagtcttaaacttctgggctcaagtgatcctcccgcctcagcctcccaaagtgctgggattagaggcatgagccaccgtgcctgtccaggaatctgcatttttaaatgaattccattgtagttctaatgagagggttgaggggacttcaggcctcatccagccccttgtatgcacatttatattactgggccagcaagaagggagctggtcagaagaggattcttagctgagaaccaaagagataccattcattcattcacaaatgtgtactgaggcaaagtgcccagcactggggatattaataatgacagccgcagccaacatttactccacagctcttgagtgctttttttttttttttttttttgagacagagtctggctctgtcgccaggctggaaggcaatggagcaatcttggctcactgcaacctcccacttccctgttcaagcaattctcctgcctcagcctcccgagtagctagaattataggcgcacaccaccacacctggctaatttttgtatttgtagtagagacagggtttcacca[137 bp omitted]tggtcaggctgctctcgatctcctgacctcaggtgacctgcctacctcagcctcccaaagtgctgggattacaggtgtgagccaccacgctcggactcctgcatgcttttgacatgcaatcttccccccggcattccccacggctggctctgcccacctcctaggctcgctgaagccttcccccatcatcctatcccaaactgtaactaccctgattttccataccctcagcccctttatttttctctacacacttcttcccatcttacaaattacatattttatttaattacatcggctgtttccacatgggccttgttcaagctagagcaatgcctgtcactcagcaggttctcagtgaatgttggatgatcacccctatgaggttggaactattatgaagcccattttccagatgagaaaaatgaggcccagagaggttaagatgtgggtccacacacaactggacaggggtagagtagggatctgaagacaagcatgctggctaccaagctgctgttcttggaaatgagatagccaggactggggtcacctgagccttcctgaaccggtgtgctaggtttggggtgggatctggggtcatatctggggatggtagttggctggcagaagaagcacctcctgggttctgaccatcagtcccgtcctaccccgcagatgcaccctggaagccaacagtgaacgggacaatggtggccgtagagggggagacggtctctatcttgtgctccacacagagcaacccggaccctattctcaccatcttcaaggagaagcagatcctgtccacggtcatctacgagagcgagctgcagctggagctgccggccgtgtcacccgaggatgatggagagtactggtgtgtggctgagaaccagtatggccagagggccaccgccttcaacctgtctgtggagtgtgagtaccttccgctcccctatgctggggatggacggttccgtgggggacaccagggttactgtgggtgcccacgcatcccaatcagtattggctttgcctgtcctccgcagagacaaggaagggagggcagggaagctgaattcacagcaggaaaataaaatcccatctgagaatattgtgttcccacatccgggagtgggcttttttttttttttttttttttgagacagagtattgagtcttgctctgtcacctaggctggagtgcagtggcaggatctcggctcactgcaattgctgcctcctgggttcaagcaattctcctgccccagcctcctgagtagctgggattacaggcgctcgccaccacacctggcaaatttttgtatttttagtagagacggggtttcgccatgttggcctggcttgtctcaaacccctgacttcagatgatctgcctgcctcagtctcccaaagtcctaggattacaggcgtgagccaccacgcgcagcctggggtgggcttttgaccagtgaaatttctggatcctgtggccactgcccctctgcactaaccgaaacaatgaccatgatctctaacctgtgtagagtgtcgctatgtaccaggcactgttggaagcgctgtacagcaacccactcatttaatcctcatgacatcttcatgagggaggttctattactgtttccctgtttacggagaaggaaactgagacccagagaggttatgccacttgcctaagttcccacagccaggaaatggcagaatttgaggtttgaatccaggcagtctggttccattcttcttccctgcccaaggctgacctcatcctatgttatgacagcagaatacattgatggggtaattgctatacacaaaaggctgtgcggctctgtgagaggtggaggatagggctgagaagacaccacgcttatgaacaggtacagaatagctggagagatgacacagatgcacataaaaagctactgtcttggaaatgaaactcaccattgcaccgctggccagcgcctctcatctcctcactatggactgtgccaccatctcccaccacccctacccccacagccatcactccaggttgtagcagccaagtcacagttttgactccccttccttaagcaattccctctggaatatcgccttcctgtttccatttcccctgcttcctcccaagttcctgttggcttctagcactcctccccaaatttcacctctctggtcttcacgatgcccacaatggcccccaccacacaagtttgccagaaggttcgatgacattcaacatgcaaagaattcaaagcagtgtctgctacacagtacatgctctgtgctgtgtacatggcgacaatcagtacatggcagatacaggttagtcctcgggggcaacctctcgtggcaaagccgtccctctcctgctgacctataatcttcaggcactttccctcctggttctgttccctagcggggctgatgtgatcctggcgcggggctgcgtggtcccctgctccctccaactgtgcgtgctatcctgggccagcttccccctctggttgtcccctgatccctgttacaccccacaccagtgattcttcagtttaagagtcagagagaggagccgatgggagtacttgaacaagcctgcagcaccaactcacatacattttccggtggggtgcagatctctcctttatagtaagagcagcaggcagcaaatgcgcgttaggggcctgccctgggccagaccttgaatcctctacagctgttttctggttcagttcttatttttattattattattattttttttttgagactgagtctcgctctgtcacccaggccagagtgcagtggcacgatcttggctcactgcaacctctgcctcccagattcaagcgattctcctgcctcagcctcccaactagctgggattacaggcatgcgtcaccatgcccagctaattttttatttttagtagagacggggtttctccatgttgcccaggctgttctccaactcctagtctcaagtgatccacccgcctcggcctcccaaagtgctgggattacaggtgtgagccaccatgcccagcctatctggctcattttcaattctagggtcaccctgtgaaacaggggtgtgttataattatcccctttaccaaggagaaaactcaagggcggaattccctgaggccaggcagctataaaagtgggtccgagcccgataattccagactcctgtctgccccagctgttaaacctctggctgcctcacctccctcacagctcttagcactctaggactcaatccggcttctcttgaaaacgaacacgcaggcagatgtggagtgtgcaggcctcacctgctagacttgaggggagcagtggccctgtcccctgccccacctgccagctccctactcttcacccaggcctgtgtcaaagtgcttgcccttggagagtgcgaccctcaggccccctccctctccacacagtcaatgttccctggcaccaggtctccaatgttcactgacagtggtggtgacccttgagcagggccttctgtcttacctgccaaccccagagccctgaacggcacggggcatgcaggaagtgtgcaaccttaccgagtgcctgagatgtctagggaactagcttgagtacgttgtacgcattgacctattttgttcttacaaccatgtgattgaggggagggtaccattcttcaacccagtttaatacaaggaaacagaagtttgactggcatccagtcccaacagggctgaacagacctgggctagaatcccagctctgtccccatcctcctgcctgagctcaggcgagtgacttcagctttgcaacccttagcaagggttcataacagtatcttaccacaaagatggctgtgagaactaagagaattaggctgggcgtggtggcccacacctgtagtcccagcactttgggaggctgagacagttggatcacttgaggccaggagttcgagaccagcctgaccaacctgacaaaaccccatctctactaaaaatacaaaaattagccaggcgtgatggcgcacacctgcagttccagctactcaggaggctgaggcaggagaatcgcttgagcccggggggtggaggttgcagtgagctgagatggagccagtgcactccagcctggatgacagagcaagactgtcccagccccccactccagcctggatgacagagcaagactgtcccacccccccactccagcctggatgacagagcaagactgtcccatccccccactccagcctggatgacagagcaagactgtcccacccccctactccagcctggatgacagagcaagactgtcccatccccccactccagcctggatgacagagcaagactgtcccacccccacactccagcctggatgacagagcaagactgtcccacccccccactcccccacaaaaaagaagaactaagagaacaatactgagtgttcatagtgctacatactctgtggatattggatgtcatcatctttctcactgatttttcctttggactccaggttaaatatttgttgtgtgttttgctgctgaggttttgctcatgtgacctctctgcgggaatggttctgtctatccacccatgagtacttgggtgggatgttacgtatttttaattttaattttttatttttttgagacagggtcttgctctgttgcccaggctggaatgcagtggtttgatcatcgctcactgcagcctcaacctcctgggctcaactgattctcacacttcagcctcctgagtagctgggactacaggcacacatcaccatgcccagttaatgttttaattttttgtagagatggggtcttgctctgttgcccaggctggtctcaaactcctgggctcaagtgatcctcctgccttggcctcccaaagtgctggaatgacaggtgtgagccactgcacccggctgggatgttaagtgtttacaacacacttgcgcgcctatcttcggagtcccgtagccccttgtgagttactgactgtaaccccctggtttgcacagatgagaactccatcctagaggcccaggagcctgagtggcctcacccagccagtagatggcagagctgggattcaagccaaatccatcccaccacaaactcctcattctttgtacctttgtcttacaggtttgtctagagtcccataacagtttccgcagcttcacaggttgtctgaaaagatactaagcacgtgcaccggcagggtgtcggcgttccgccgacatccaggtcgaacactttgtcaccagagcaccagtggggctgtcttgagtggaagtgctttgaaaaagttttatgtctgtcggttcaggttcgctgttattaatgtactccgtggcgtgttagctggttaacgctatagcaagcatattgcagctctgcccgaacaggactttttattcagtagacttagagatgtttgcacagaggttcccattcctgccgtgaatccgtgtgcccgtgtgactcccaggtccaccaccgttaccggcacattctttttgctagcaattgaaaataggtggggtaggtgagccaagggtctcttgcctgtgtgtaagtgggttttggtgagaactcactgagaaccagtgctcagtctagagcaagccaaggagggtgctggactctcaggccaagaaagagaacacagtttaaaaagcagcattctgtgctgtaatacaattgcgtattttggtacaaaaattagccaggcatggtggcacgcacgtgtagtcccagctactcaagaggctgaggcaggacaatcacttgaacctgggaggcagaggttgcagtgagcagagatcgtgccactgcactccagcctgggcgacagagagactccgtctcaaaaatcatagtaataacaataataataataataatttcctgttttggaaaatgaaagaaaaaacctaccagtactatttttgtaatccagtggcagcaaagcaaagctcaaccaagtgactttgggtggagggtggtgtttggtgctagtggcaggagggaatctcatgggtgaggaagggccggggttcaaggcggctttaggggaggaagtggggggcatctgcagcgcagactgaaaggaaggagcacagcctggaagccagaaaggaggggatagtctaagcctgtgtgagccccaagggtctggggaggccgggggctgggagagttccatggttcctcccttctacgtgtggggcccagagtggagaaggagcaagcccctgtcttgatggaaacaggaggccccttatgtaagtgtgtgatgcagggagggtgagtgctggggaggagaactgagtgaggcagggagtgaatgatacgtggagcgaggtgcagcttccctgggtggtcagagaaggagacgccgcatgggtagaggccagtttggagcgagggagggcgttccacaggcaactgatggaagtgttccaagttgagggagaaacgtacagaccctggagtgggagaaagctccacgattttcagacacagcaaggaaccggtgtggctggaaaggactaagccagggggagagaaggagagagtgtgtggtcaggcagggcctgaggggccttgtagatgaaagactttgtattttgggctgggcacagtggcttgcgccttataatcccagcactttgggaggccaaggcaggaggattgcttgagctcaggagttcaagaccagcatggggaacatagcaagaccctgtctctacaaaaacaaacaaaaaccctccagtaactatcatgagtatgacagatttaccgtcctctgcaattctgaacataaagctttaaaatcaaaaggctttttgcaaatttggcaccaccctgatttgacagcaaaatctcgcctaaagaacacaaggctgtttgtaatctatactgatttcatttagggtgaatattcgtactttttgctgtatacattacattgaactatgtgaaat[131 bp omitted]ctgcacttcagcctgggcgacagggccagaccctgtctctaaacgataaaaaataaaggatttgtattttaggtgaaccacggagcaacagaaggagggttttgagcagagagtgccatgatctgatttatgtattacaaggtgaatgaggttagagagagtgtaagagccagggcccaggagaaacggcccgtccctgtgacatagtgctctgtccaggctgaagctgaggctagagtcgcctcaaaagtggcaccagaagaattgccccaagagagcaccccaaaccaccccgaaatgaggccacttgggattccaaagagagaggcactaaaccaccaggtgatcatcagtccaaagcatttgggaggggaacttgcacagtgctacggcgagagaaagggagggtctacccagacacgtccgtgagggtcagggtatgggtttacatgagggtttaaggaatttggcccagggctggggctggtttctttcattctttcatttttgttgttgttgttgtttggggtttttttgagacagcgtctcattctgtaacctctcgtactcctgacctcaagtgatccactcactcttcggcctcgcaaagtgctaggattacagcagtgagccaccatgcccggcctctttcagtgttttgagcaacaacctaaacacctttatcagtgcctgggaatgttcaaggccccaggcgtgggttagtgaagcttgcagtgaaaacaggcagccggcggggtcgtagtgaggtcaaggcgctctcagtcaggacagagaaaaaaggaggggaaattggagggccctacaggaagctaccgcccccatccttggccacactggccttgccttgagccaaggagtctccggggccgggcctcgcgttggctccgggccaccctcagacctgattttgcccctgcagtcgcccctgtgctcctcctggagtcccactgcgcggcagcccgagacacggtgcagtgcctgtgcgtggtgaagtccaacccggagccgtccgtggcctttgagctgccatcgcgcaatgtgaccgtgaacgagagcgagcgggagttcgtgtactcggagcgcagcggcctcgtgctcaccagcatcctcacgctgcgggggcaggcccaggccccgccccgcgtcatctgcaccgcgaggaacctctatggcgccaagagcctggagctgcccttccagggagcccgtgagtggcgtggacttggggtgggagccacaggagggagcgggcacgtcttagatccaagctcccaaggctgaccaacagccacagagcatgggctatgcagattgacagaaaggtcaaattctccctttccggttggagaggagaagccgccctgagtttgccccgagtttgctaggacctttgaggcatgagcccctccccagggccctctagcatgaaagggattgccctggcacgaggaggctccgtgccaatcagtcagtgcaaggatgccccggctgtgtgactacattgactgtcatcccagcatgtctccaaagttctcaggtgtcgtcaccaccacccatagccctaagggcgcctgggtcttttctgtcctcagatcgactgatgtgggccaagatcgggcctgtgggcgccgtggtcgcctttgccatcctgattgccatcgtctgctacattacccagacacgcaggaagtgagtgccagctggggctgatctggggatgggagtctccaaaaaggggacctggtgggagatggaggcccagagtgggtgggggaaggcagcaccataagtgtagagaaggcagattctgttctgggaatgttcagctggacagaggagagagggttcctgttaattccagcccctgctggtcaggggcacaccagggcctgggctgagccctttacacacatcatttgagacctgtttgcccacattctattttgacagcctccctatctctaggaactctcccctacacactccagtgtggtggggaaagcccaggtaccccactgcagccacagcagcaggtccacttgacgccagaagccccaaagattacacacatctggggcaaaaaaaaaataggccttggccgggcgcgttgactcacgcctgttatcccgcactttaggaggccaaggaggaaggattgcttgaggccaggaatctgacaccagcctgggcaacatagcaagaccacatctctaaaaaaaatttttttttaattagccaggcatggtggcacacactgtagtcccagctacttgggaggctgaggtggaacgattcttgagctcaggaattagaggccagcctgggcaacatagggagaccccatctacaaaaaaacaaaaaaattagctactagtggcacgtgcctgttgtcccagctactcgggaggctgaggagggaagatcgcttgagcctgggaggttgaggctgtagtgagctatgatttcaccactgtactccagcctaggtgacaaagagagaccctgtctctaaaaacaaacaaacagacagacagacagacagaaagcctctccagccccaaaccatacccacctggcccaactcagctgcagccgtgtttctttcttgtggcacacacacatcagctgtcctgagaaataaattaacccctctgctccacatcctggtggcaagaggggcagaaagacccagagcctatgaggggaacctggagaatccaggtgggggtcctgaaaaacggcagagctcaggggccaggtggctcgtccccagccgggcaggggccacagaggtgggaaggatgggctgtgtgggtaggagaggctggtggttctgaaagggctgcttgccacatcttagagatgggtgggagaactctgaggtcccctgagccaaactcctaaaacacgtgggggtgcagaaagggagggcagagagaggtctgacgagtcctgccctgcagaaagaacgtgacagagagccccagcttctcggcaggggacaaccctcccgtcctgttcagcagcgacttccgcatctctggggcaccagagaagtacgaggtaaggaccaggctccaggctggcctgggaacctggatgccagggacactgaaggcctgggaaaggcctgtgaggccaaggggcaggggagtgggagcggcctctcacaggaggagaggaaggacattccagggctgggttggacctggaggctggggaggaggtgcccaggccgaagctgtgtagggggcgatgggacgtggggcctaagggccccctcccctccctgcctgtgtctgtgactgcatttccttctccaatagtccaaagaggtttctaccctggaatctcactgagtgccccaggaggtaggttccgggggcctcagtgtgccctcctctgggccctccttgggccctggggttggcgtgcatgtccgtgtgtccctgtcaggcgtcaaggtggtctctggtgatgtccgggcctgcccggcagtgctggccttgtctagtctgtcctgttgcagctcccttctgtctgtggccaccgtcctgtgtgtccaaattcctgtggctagggggtggagggaggggtgggaagcgtggggggaacccacatgtcacctgcaggacctcccagattgagggcggacccatgcaggacccatgggggggcacgtaccaaaccaggtatttccaggaatttggaaagatggggtcctgactaggtggttttcacccaaaaaggtattaggggttacattgtgtgccctcaaaactcctatgttgaaagcttcctggacgggggcagtggctcacacctgtaatcccacaactttgggaatctgaggcggatggatcacttgaggtcaggagtttgagaccagcctggccaacatggtgaaaccctgtctctactaaaaatacaaaaaattagccaggcgtgttggcaggtgcctgtaatcccagctacttgggaggctgaggcaggagaattgctggaacccaggaagtggaggctgcagtgagcaaagatcgagccattgcaatccagcctgggtctcaaagaaaaagaagaagaagaagcagcttcctggagaaactgaatttgtaggcaaatttcaagttcagcaatgattaacactggcagaagctccagagtgggacctggtgaccgcagggctcgctgggcctgcggtccttgagaaaggaggttctcgcagggatttatttgggactgaactcaggagctctgagggtgcaaacgctctgtcctctgcattgggaaaaggcagggagcaggaccctgctaatgggcggtttcccctcttagagcgagaggcgcctgggatctgagaggaggctgctgggccttcggggtgagcccccagagctggacctgagctattctcactcggacctggggaaacggcccaccaaggacagctacacgctgacggaggagctagctgagtatgctgaaatccgggtcaagtgaaggagctgggggcagcctgcgtggctgacccccctcaggaccctcgctggcccccactggctgtgggctcccttcctcccaaaagtatcgggggctggggcaggaggggagtgaggcaggtgacagtgaggtcctgggggcctgacctccccctccttcccagctgcccctccctgccagcacccccacgccctcattacggctcctctctaacctcctttaccctcatctgtctggaggggagctctgtctgtccgtgttatttattgctacttcctgcctggtctcctgcccccacacctggccctggggcctgtacaaaagggacatgaaataaatgccccaaagccaaatgccagtctagatcctgatgctttctgacccgcctttgggcagcctgccatcccaccgtctacagaacgatgacagaatttctccttgccctcggctgagcctggtatgcaggcaagggcccagggattttagccttgaacccagggccagtggccactaagttgctcccactctgagctggtagctgcgagctgggtctggtttgacttatggatgatttcacataaaaatcctcatgctggtttttgccgcagtcagatcagctgacagcaccaggcttgcacttgtacgtggacatgacttgctgaaagggagggtcctgtgcactggccgcagtccccaccactccctattgtcccacacctggccggcttcctgcactgagattacctcctggtccctgcagcttggagtgcgagccacagatctaggtctcaccagcccgtgttggtttcaccaccatctctcacattcatgctgcaatttgcagcgtcagcctttatacatcactacattcagttccagaaacattaattaagcaccagctgtatactgagccctttctagaggctcaggctgtcctgagaagggtctcctaggacagctctgtgacgatgagaacactgagacttagagaagttaggtgattttcccagggtcccagagctcggaaacggtgtgtccaggccatggggttgatgcttctgattcaaatgcactctttcttttcttttcccttcctccctctctctctctctctctcttttttttgatggagtctgtctctgtcacccaggctggagtgcagtggtgcaatctcagctcactgcaacctccgcctcctgggttcaagtgattctcctgcctcagcctcccaagtagctgagatcacaggcactcgccaccacgcccggctaatttttgtatcaaatgcactttttctataatacctgtcaggaagttaaaaagggccagagtgtctggtataaatgggattgataactaacagttgttgaacgctttctatgattctacccagtttgcattaattaatctccattaacctcatttaccttccctaataactatgacaatggttctcaaagtgtggtccctaggcagcagcatcagcagcacccaggaacttgctaaaaaggcaaattttcagcccccaccctagacttcaggaatcaaaaaccctgaggtggggcccaggaatctgtgttttgagaagtccttggtggattctgatgcacgtgcacgtttgagaacaagcagctgaagcatggagaagttacatcagttctgtggtccccaattgttagcagtggagcccagatttgagccccgaccactggcttcggaggccacactctgacgctgtgctacacggccatcttggtgagaaccaacagctgctcacagagcccgggtgctggaggagcagtaaggttaagctgtgggctgcgggcagtgagggcagggtttcctagacggcagctctccctgatttttttttgttttttgttttttttgtttattttttgagatggagtctcactctgtcatccagtctggaatgcagtggcacgatcttggctcactgcaacctctgcttcccaggttcaagcacttcttctgcctcagcctcccaagtagctgggactacaggcgtgtgccaccacacccagctaatttttgtatttttagtagagacggggtttcaccattgttggccaggctggtctcgaactcctgacctcaggtgatgcgcccaacccaccctcccaaagtgctgggattacaggcatgagcccctgtgcctggtctctccctgcattttgaagaaggcagaggacacagcacagagaccaaaataaaggcctagaggcaggaataaacaaaccaggtcgggaggggaggtgacatggggctgcttggctgggatgggaagtccacatgcaggaggaaaggagacgtgtggggggccgggctgtgggaagggaaaccctctgtggggcctgtccaagctgggagggtgcatgccctttcttcacggagctcacagtcttgcagggacaaggacatgaaagaatctcatgcacaatatcaaactgcaactgtgacaccggcttccaaggagaagctcagagtttttacagcaggggtccccagtgctatactgcacacccagatactggtctgtggcctgttagggactgggctgcacagcaggaggcgagcagccagcgagcaagcatgaccacctgagtcctgcctcctgtcagatcagcagcggctttagattctcatagcagcacgattcttatcgtgaactgtgcacgcaaaggatctaggttgcacactcacagatggtgcctgatgaactgtcactgtctcccatcacccccggatgggaacgtctagttgcagggaaacaagctcagggctcccactgattctacatgatggtgagttgtatacttacttcattatatatcacaatgtaataataatagaaataaagtgcacaataaatgtaatgtgcttgaatcatccccagctccctccccactctcaggcccatggaaaaattgtcttccatgaaaccaatccctggtgccaaaaaggttggggaccgctgtgtgacttaaggtcacagggggcaggggaggcttccctatggaaggaaactcacacatgtgtgaaggccccaagtgggaacatgtttagcaaaattccaggagctgaagcaaggccagagaggcatcggatggggctggggatacacaggggcctctcagcagccgggagggaagcctcttccagatcccctgcatacatgctcaccagccctgccctgacacacctgtcccctgacgacagactctggctccagcaggtctggcctgggaggacttcacccagaggagcaaaacattgtcaataaccagggatcggggagtaactcacgctgcccaaagtgcagcttgagggccctgggagccactgtgacgctactgtgtatgcttcatttagtatgcaccggaacaacaggaaaccagaatgccgcaccagcttcggatgaggctaagtcaaaataaataaataagaaagaaatcaatcaactgaactgattttaaaaatgtattaaataaacatgttgcaggtggctcctgaaggttgtaggcaaacctctaaagtttgggaaacaatgagggaatttgacacaaagaccatccttaggagggaccg[131 bp omitted]gcgagaccctgtctctacaaaaaatacaaaaattaggcaggtatggtggcatgcgcctgtagtcctacctactcgggaggctgaggtgggagggatagtttgagcccaggaaatggagtttgcagtgagccgagattgaaccattgcactccagcctcagcaacagagtgagaccctgtctcaaaaaacgaacaaacaaaccagtaggacctgaactcaagttcactctctcagactttccccacccagctcctggaccccaccagaattcaacacatgctcactgagcacctctgtgtgccaggcctatgctgggccccagggtcacagcagtgcccaaaaagaatcactctgtgacctcccagagctgacattctgcagaagagacagacaacgatcagaaagacaagcaaacacatgaccgcacatctgacagtgaaggaactgcagaggggtgcaaggtcaggctgtgctgggtcaggctgccatttcagaaagagaagtcatttgacttgagaccagaaggaagtaagggagggagctctgtgggttcctggggaatgtgggtccagggaaggccaaaatcgagtgcaaaggcccctggcgagaatgtacttgttaccttcatggaacaagaaggaaagaagcatgcttgagtggagtgatggagccagagtggttgcccaaggaagctcgattacacagggccttgtaggccacaggcaggactggggcttgtttgtttgtttctttgtttgtttgttttgaggcagagtatcgctctgttgcccaaggaagctcgattacacagggccttgtaggccacaggcaggactggggcttgtttgtttgtttctttgtttgtttgttttgaggcagagtctcactctgttgcccatgctggagtgcagtggcacaatctcagctcactgcagcctctgcctcccgggttcaagcaattttcctgcctcagcctcctgagtagctgggattacaagcatgtaccaccacgcctgtctaatttttatatttttagtagagacggggtttcaccatgttgaccaggttgctcttaaacttctgacctcaggtgatccacccgcctcagcctcccaaagtgctgggaatacaggcgtgagccatcccgcccagcaatggaatttaatcctaggttttttttttttttttttttttgagatggagtctcgctctgtcaccaaggctagagtgcagtggcatgatctcggctcattacaacctccgcctcccgagttcaggtgattctcctgcctcagcctcccaagtagctgggattacaggcacgcaccaccatgcccaactaatttttaatagacacggagtttcaccatgttggccgggctggtctcgaactgctgacctcaagttatctgcctgcctctgcctgccaaagtgctgggattacaagtgtgaaccactgtgcccagccaggacttgggctttcaaagagcgcgttgagaagccgctggagaagtgagttcggaggggtgtgatggcaggcttgaggcttcagaggcccactggcagctgcgtggacagtgagcacaggctatcagtggaggcagggacagggcttgggaggccctggccattgtccaagagagaggaagtggagatggggagaggggtggggtcaggacccattttggaggaggaagtggtgagactcacttgaagagtcaaaggtgactccagcagcttccttaagaggttgaagaaagcaggaggggcaggttcagtggagaacgcaagagtgatctactccggccgagttcaggcccagggaggccctcagggacagggaaggcagatggcaccccctccctgggaaatgccaagccgaggaagagtcagaacacatgacacagtgactcagagagatgggggcagacgctgagatgagggttggccaggcaggaaggaaggtgagaaggtctcatggcctcacgtgccagtagggctgggccaccacgtgtgggagggaggacacccaggcaccaggccatggtcatgacacgggtctctttgtccctcccggtctgccaacctcctgagtcactcctgacggagatgactgatccatccctggcccgcctcccaccctgtccctgggacagtgcctggggcaggcagctccattatcctccttgatgaaagagctcccagccagcactggccactccagagcctcctccccaggtgggtgatcatgcagggctgggctcttgcgactggccgggggtagagatgcaccgcactgctgagaagtgctttctaggagttcaagaccagcctgggcaacacagcagacattgtatgtagaaaaaaaaatgtttaaaaataagctgggcacagtagtgcatgcctgtcatcccagctactcaagaggctgaagcaggaggaccacttgagcccaggagtttgaatctgcagtgagctatgagtgcaccactgcatgccagcctgggcaacagagtaagactcagtcactaaaaaagaaaaaaaaaaagatcgaatgtggtgctcatgcctgtaatcccagcactttgggaggccaaggcgggcagatcatctaaggtcaggagtttaagaccagcctggccagcatggcaaaaccccatctctactaaaaatacaaaaattagccaggcgtggtggtacgcgcctgtagtcccagctactcagaaggctaaggcaggagaattgcttgaacctgggaggcggaggctgcagtgagctgagatcgcaccattgcactccagcctggacaacagagtgagacttggtctcagaaaaaaaaaaaaaaaaaaaaaaaagaaagaaaagaaaaagggggagaaaaaaaggagaagtaggcgagcctctttctttccccactcttctcgctctcaactccaggctgctccttaaacaggaggtgacaacctcaacctcgcaaattaaaaaaaaaaatcttttaattttgaaataattatcacaggaagttgcaaagatagaacagagaagtctggcagcagctgagccaaaggccccttcccaccctagagctcgatctgcctggggagcgggaaggaaatgacagtttagtcccaaagggcctctctgtgaagctcaggctagggctgagtagccagaggtgggtgaattaatgtctgcagggagtgctgggtcagcagcgtaagtgacaatgtctggaataatgacagctcacttttacagagagcccgttccatagcagccaccatgcaaagtgctgtaggggctggggacctgtcacagcatagccctgaagtcataacagcaatcttattatcaccctgggagggaaactgaggtgatgtcacaacaaacacgtggcagacctgggactggaacccgggtctttttaccacatgcttgtcatgggatgtgcgagttgctgagtgtgtcctgtgtgtgctgtcaccagcccggtgaggaaggcactatcattgttcccgtcttaccatcctgggcagaggttggggggtgagggggacatagccaggcagggagtagccacccagggctcacagggactctgttagttgcctgctttcactgcttccctggtaaaggggtgacagtcaagtcaccaaaaaaggagaccaacgacctgtttgaaggaacagggaggaagagtgaaagcgccgaggctgcgttctcaggagtcctgctcctcctcccttgccttctccacgcagcccttggcctccagaaatcaagacacgtccacaagcccaatctcctcctgttagaagactatgagccacacctggtgctgtggcctgcagaaacctcagctactccttctaggtgaggagcaggaattcaagccccaaagggtaccctccctgagacctttgggacctggccacctggcttggagtcccccattgagattcctgggattaaaaaaataaaaatatacggccaggtgcggtgactggctcctgtaatcccagcatcttggaaggctgaggaagtggattgcttgaggacaggagttggagaccagaatgggaaatgtgagaccccgactcaataaaaaataaaaaataaattaacggggtatggtggctggtacctgtagttctagttactcaggtggctgaggattacttgagcccacctcaagttcaaggctgcagtgagctatgatcacaccacttcactccttcctgggtgacagagcgagactgtcttaaatttttttttttttaataagtatagattcacagaagttgcaaagatagaatagagaagtctggtgtactcttcacccagcatcccctgatggttacttcttaagtcattcaggacaatatcaaaaccaggaatttgacattggtataatgtgtgtgtacagttctatgtcattttatcacatctggatgtatataacaacaactgcagtccagatacagaattattctgttactacaaagacctcccttgtgctactcccttcatagtcagacactttcccctaccatccctaacccctggcaacttttcatcttctccacctctatcattttgtcatttcaagaatgttatgcctgggcgtggtggctcacacctgtcatcccagcactttgggaggctaaggcaggtggatcacttgaggtcaggaatttgagaccagcctgaccaacatggtgaaaccccatctctactaaaatacaaaaattagccaggcatggtgttaggcaccttaatcccagctactcgggaggcttaggtagaagaatcacttaaatcctagaggcagaggttgcagtgagccgagatcgagccactgcactccaacctgggggacaagggcaaaactccgtctcaaaaaacaaacaaacaaaaagaatgttgtaacacatgtgatccttggagactggcttttttcactctctgtaccactcttcagaatcgtccaagttgttgcctgtatcctcttcatatctcactcctttttattgctgcatagtactccatggcatggatgtaccgtaatctgttaagccactcacctagtgaaggacgtattggttgtttccagtttttggttttgcttttttttttcttgagatggaatcttgctcttgttgcccaggctggagtgcaatggcgtgatctcggcttaccgcaacctctgcctcccaggttcaagcaattctcctgcctcagcctcccgagtagcttgtgttagaaatgcttgatttttggtgctgtaaagaaatagcactttaatgtaaatttaatttcttcagcaaggctagttttactttctgcagaaagggtatactcgctagcagttttgctacaaaagtacactgaacaaaggagacagggtcatttataacttgatgcatctactttattgctgtgtctggtttctattggctgaaacgggacctcacattctgtatttgtctggattggctagcaacttagaactttttaaaagaggcaaaggcagaggagaacaaaggaaggagaaagtaacgtggaatactgagaaaagtaaaaacatttctaaataaggaagaggaacaggctttgacttaatgctttcttggactagtataagcatgctagggcaaatctttaggctaaattgtaggatctaagaacataaagtacattgatttttttattatggctagtagatatttaagaatgttagcacaggtctttgaataaattttgcttctaagagaagttactatttattcttaattagatggggaggacagtctctttgaaaaggaacttctactttactatttacactgggattaccagcatgtaccgccacgaccagctcattttgtatttttaatagagacaggatttcacaatgttggccaggctggtctcgaactcctgacctcaggtgattgccctccttgg[138 bp omitted]taattgtgtgcaggtttttatgtggacatacgttttcatttcttagggataaaatgcccaggagtgcaattgctgggtcatctggtaggtatattttgtttagtttttcaggaaaccggcaaactgttttccagagtagctggaccactttgcatccccaccagtcgtgtgtgaatgtttcaagttcacagcatcctcaccagtgtttggtgttgtcattattggttatttaattttagctgttctaaagcggtatcttgtcatgggtttcaatttgcatttcactaatggctggtgatgtgagacatcttttcatgtgcttatttgccttctatataccttcttcagggaaaggtgtcatcatgtcttttgcctattttctaactggactgttttttatttatttatttatttatttatttatttatttatttatttagagacagagtctcactctgtcgcccaggctggagtgcagtggtgggatctcagctcactgcaacctccgcctcctgggctcaggtgactctcctgcctcagcttcctgagcagctgggattataggcgcacaccaccatgcctgctaatttttgtatttttagtagagatggggttttgccatgttggccaggctggtcttgaactcctgacctcaggtgatccactttgcttcccaaagtgctgggattacaggtgtgagccatcgtgcccagcctgatttttattttatatatatatatatgtacacacacacacacaatatacatacacacacatatatgcacacatatgtgtgttaaagctgtatgtaaagctgttatatattacatatatactacatatataacagctttgctgagatataattcacataccataaaacacacccatgtaaaatgtccaattgaatggttttgggtctattcactgaattatgcaaccatcaccacaaccagttttagaacatttcatcaccccaaaataatctcacatccattagcagtcactcttcatttcctcttacctttcccaccccaccccagccctacgcaaccgctacatctacttctgtctctacagatttgccttttctgaatatttcacgtgaatggaatcatacaatatgtgacattttgtg[136 bp omitted]catggtaaaaccccgtctctactaacaatatgaataattagctgggcgtggtggcggatgcctgtaatcccagtcactcagaaggttgaggcaggagaatcgcttgaacctgggaggcagaggttgcagtgagccgagatggcaccactgcactccagcctgggcaacaagtgaaactcggtctcgaaaaaaagttcatccatgttgtagtatctatcagtacttcattcctttttattatcaaataatattttattgtttaggtctcccatattttctttattcattcatctcttcatggacatgtgggttgtttctgctttttggctttcatgaataatgctgctgtaaacatttgtgttcaagtttctgggtgaacatgttcttatttctcttggttatatatgtaagagtggagatgcaggagtgtatggtaattctatgcttaatctttggaggaactgttttgagacttttttccagagtggctggacaattttatattcacactagcaatatataaatgatttagtttccatacatctttccagtatttgatactatcttttattttagctgttcttatagatgttagtagtgatatctcatcatggtcttaacctgtctaaaggctagtgatgttgaatatctttttagataattattttctatccatatatccccttgggtgaaatttctctttatatcttttgccagtcttctaattggatgatttgatttttttatgtagtgtttctatgttgaatttgagagttctttatatatttgttctagataggagtcctttgtcagatatgtggtttgcaaatattttctcttagtctgtaatttgtcttttcattctcttaactaggtcttttacagagcaaaaaaaaattaattttgatgaagttggattgatttttttagggatcatgcctttggtgtcatgtctaagaacacttcatcaagctctaagtctcacagattttctcctatgttatcttccagaggttttttgtttttattttattttactttttaattaagacagagtttcgctctgttgcccaggctggagtgcagtggcaggatctcagctcactgcaacctccgcctcccaggttcaagtgatcctcctgccttggcctcctgagtagctgggactacaggcacgcaccacccaactggctaattttttgcatttttatgtggttgctttcgagaattttctctgcctcttgtttttagaagtttgactatgatgtgtcttggcatgaatttctttgggtttatcctgtttgtgatgcgctcagcttcttgaatctgtagacatatgttgtgcgtgtgtgttgtcaaatgaagataatttgcagccattacttcttggaatatttttttaaggcccaccctccttttcctccccttctgggacttcaatgacaaaatgttagatcttcttttattatagttactcatgtccttgaggctttgttccattttctttcatctattttctttccattgttcagaatgggtaatttctattgttatacgttttgtttcactgcttctttcttctatactctccattctgctattgagcccatccattatggtttttatttcagctcttgtattttttagttgtattttttagttctaaagtttccatttggttcttctttatattttctatttctttgctgatactttttattattttatttgtttcaagcacatttataatttctcagtgaaacacttttatgatggctgctccaaaatctttgtcagataattctaacatctgtgtcgtcttgatgtttgtgtctgttaattatcttttgttattcagtttgagaatgcctgattcctagtatgacaagtgatttgccattgaagtcaggatattctgggcactgtgttataagattctggatcttctttaaatattttgttttagtgggcttccctttatactgctccagcgaaataaagtagggcactgcctgattgcttccagacagggataaaagtccaggttctccatccagcctttcctgaacctggggggttgggagagatgaggcctccatgttattgtttggtaagggtagaagttcaggttccccactaggaatccatgacaactccctggctgggagtgggagggatgcttcattactgctccctatgtggctttcactgacactgtgtgtggcagagagaggggggtgcttgttaccactgagtggtggcgaaagtcccaactctccaccaggccccctttgacactactccaatggggccgggtggaatgcctcatttctgcattggggtggcagtggatgtccaggctgcccacatggtttccaccaacaccacatcgggggagggtgatcccagtggggaggaatgtcccagctccaactctagcatcactctggctgagtatgggagtggcctagggttctttgttacagcctggtgaaggtgaatgtctaggttttccatccggcctttgctgacaagggtgatgatggaacttggatggagcggagcaggtatggactaaaagagctctgtctttctaggatgcccctttcctcgttctttggctagaaaagcatagttttgctagaacttgttctgttgggactttttcttgtttgtgccccttggcattttcagttgttggcttctccagtattcagcctgagatatatgaggcaaagagaaatcccagggaattcaccaccattccttaagtcccgaggttcctaaccagtctgcttctctccatctttcagtcttcttatgcttgtcttgtcacgttcaaggttttcagttatacttggcagaataaataaatacatctactccatctttccagaacatcactgctttttgttcattttatttatttattatttactgagacaaggtcttactttgttgcctgggctggagtgcagtggtgctatcatggctgactgaagccttgaactcccaggctcaagcgatcctcctgcctcagcctcccaagtagtttggaccacaggcatgggccaccatgcccagctacttttcattttttgcttttgttgactagccccacagagttttgctgtgttgttcaggttggtctcaaacttctggccttaagcaatcctcttgccttgctctcccaaagcgtattacaggcataagtcaccacacccagccctatcggtgcttttggaagaaggtgttcttccctctctctgtttccctccctatggccagctgcccatagagggcagtggtgctggagtgaagacctctcagcgcatccctcttcatctgtaggatgtgcatggcttccaatgctgtctgttctgctcctgagacactcgctggctacaggattataaaggtgatgaggtttcagcctaaagactctccattcaataacacttcctacaagatatcttttttgtttttttgagacaggatctggctctgtcacccaggctggagtgccacagcgcgatctgctcactgcaacctcagcctctcgggcttaagtgattctcctgccttagcctcctgagtagctgggaccacaggcgcccgccaccacacccagctaatttttggattttttttttttttttttttagtagagatggggttttaccatgttgcccaagctggtcttgaactcctgagctcaggcaatccacccgccttggccacccaaagcgctaggattacaggcatgagccaccatgcccagtcctacaagatatcttttctttttctttctttctttctttctttctttttttttttttgagacagagtctcactctgtcacccaggctggactgcagtggtgtgatctcttctcactgcagcctccgcctcctgggctcaagtgattctcctgcctcagccccctgagtagctgggactacaggcgcctgccaaaacacttagctaattttttgtatttttagtagagacggaatttcaccatgttcgccaggctggtctcgaattcctgacctcaagtgatccacccgcctcagcctcccaaagtgttgggattccaggcatgagccaccgcacccggccgagatatctttttcctcctcaatatctatgtgctcctccctcaacccttgggggcttcagtgtaggtggtcagattccccaccatttatgcctatgatgaaaagagtggaaatggtaataactggatggtgtcactaaactacaaatactttcaggtaggcctgtgcctttttcagcgggctgcagttctcctgcttggcttgagtcattcgcatttcctgagagctgggtagagggggagttgtggaggagcccattctgaaactgatctgatattgcaaacccatacacggaaaggaagaactgcccatacgtattcgagtcttccaatctgactccgagcccgcatccccctcaatcgtctcttttccccactccccagatcacggtgctgcttggtccccctcagagccatagagaagcagggggtgtggccatggaggggaaacctctgtcaccagagactttactgtacttctccttttgctctcagatgctgccagggtccctgaagagggaagacacgcggaaacaggtaaaaatcattttgcttttattttgcattcaacaagcaagttattacggaacagcagttatgggccaggcatacctcccagagctgggaacacagtggggacctccctggctctctcttaccggtgttacaacaggttgtagacagacccctgtcttgagcatcctccttgccaggcctgctgagtcttctgagagtagggtaggttattggatgcccaggagggaagaaggagccagggaggtcagccccaaggttctgcaaggccctcaacaggcctggactgaggaggtctggacagcatggccctgtcctgagcctctgtgcataataactgctgtccctaacctccaccccaccctcagccttccaattcccgggcctggggccctactcctgtgctccagagactcctggagctccttgaggcagcacacagtcctgctctggaggcgcccatctcccactcatgctgggatgctccagcccgtcccagagcaggttgtggctggagggtgctggcagaggagggacaatggcccggctcctggaggcaagtgttggctgcagggaacggagtctagtccttgccacagcccttgttaccccttaggtaaccttaaggggatttcaaagaactctggctctgcaaccctgctaagttttttatggaacatgtaaaatagatcccatggccaaagaagtatggacaatgtattatactatactctaatccccatgtctagagattaatggtgtagatagagtttactgaaaggtttttaaagtcctgcagtaaagaatcttacttaagccaggtgcggtggctcacgcctgtcatctcagcactttgggaggccaagttggggggatcacctgaggtcaggagtttgaaaccagcctggccaacatggtgaaaccccatctctactaaaacaaacaaacaaacaaacaaatcagacgggtgtggtggcacatgcctatagtcccagctactcaggaggctgaggcaggagaatcacttgaaccctggaggcagaggatgcagtgaactgagatcacaccactgcacttcagcctgggcgacagaagaatgagactctgtctcaaaagaaaaaaaaagaatcttacttaactcttttaccctgcctttctcaagtgtatgtgaccttgaagatgttttttgcatgtgacatgatgagtacctgcggggctgatgtcagctctgcctggggaatctgcctcagcttcagaccctgcaccccaaattcatgcttagcccaggccagacccccttcctgctgtcggcaagcagcttagctttccgcacacccatgaacagatacccagcagcctttggcatgagccatgtggcccgaggagataaacagacagagagaggaacattgatgcgtgtgaaatgttggcaggtgagtgggaggggcttgggttggtgctgagaccggagacacactctgctgtcacatccttcagggtccccgggggccagcacggagggccatgatcatgtaaattgggacttaaatttaactctatgtaaatataactctatgcagaggtcagggatggtagaggacaagctcactgcagagaaagaaagaaagatgggcaacagttgcagaacctaacccacagataggttttgtttgaccagctctgtacatttttagtttattttttatctttttgagacagggtcttgccctgtcgcccaggctggagtgcagttgcatgatctcggctcattccaacttctacttcccgggttcaagcaattctcctgcctcagcctcatgagtatctgggattacaggtgtacgccaccacgcctggctaattttttgcattttgagtaaagatggggttttgccatgttggccaggctggtcttgaactcctgacctcaagtgatctgcctgccttggcatcccaaagtattgggattacaggtgtgagccactgcgcctggctcacccatactttgttactggttttagaattcctttttacctggtctttcaaaccaagttttgaccatgtctgtccctgagtataatccttgatgagtagcaccagagagagctccacgttacccggggcctggcattcaaagcactcagtggtctggtgccactcaaagcctgtgagccaggcaggaagtttataaaattagagatggatgaatggatggatgggaaaaagcaagcaagggaggaaggaaggaagaaaggaaggagttctgggaagagagagaggctgcccccgcagggctctcagtttgaaggagaggtgcagcacactcagaaaaaactcccggccaggagtggtggctcacacctgtagtgccagcactttgggaggccaaggctggcagatcacctgagatcaggagttcaagaccagccaggccaacatggtgaaaccccatctctactgaaaatacaaaaatcagccaggcgtggtggcacctgcctttacccagctacttggggggctgaggccagagaaacgcttgagcctgggaagcagaggttgcagtgagcggagatcacaccactgcactctagcctgggagacagagcaagactctgtctcaaaaaaaaagaaagaactccgtgagcatcccaaatgccacatccccataatgcaaccagacccggtcctcccggatccaggggaagggtcggagctcagtgggtgagcaagaaaagccacgtggaagaagtaagcggccagatggctcaaagacaaactctcccctgctcaggcttgcacccagacacgacaccatgcatctcctcggcccctggctcctgctcctgggtaaggactgtggcctgggctagtactggggttctgggatgtcagtgggcactggaggaggaggaaagacccaggcagagaggcgtcaacatagggtagggtgggggcagcggtgtgtatagataaatgtacatacaaatatatatgtttcccatatatacatacacttctctcattgcatcctgctgtctttgtgtatctctgtatttctcccactatcttcagagggaattctttagtctttagaaagctctctgctgggtgcagtggctcatgcctgaaatctcagcactttgtgaggctgaggtgggaggatcacttgaggtcaggagttcaaggccagcttggacaacatagcaagacccctatctctaaaaagaataaaaaattaaacaaattttaaaataaaaaataacttttaaaagaaggctctcatgcccccttagtaatgctttctgatcactgtggtgagttctagaatacttggctttctctgactcaagtaaatgggtttttgagcaccctgaaaccctctacgcctgggagggggcctgcgtctggatcccctgcacctacagagccctagatggtgacctggaaagcttcatcctgttccacaatcctgagtataacaagaacacctcgaagtttgatgggacaagactctatgaaagcacaaaggatgggaaggttccttctgagcagaaaagggtgcaattcctgggagacaagaataagaactgcacactgagtatccacccggtgcacctcaatgacagtggtcagctggggctgaggatggagtccaagactgagaaatggatggaacgaatacacctcaatgtctctggtaaggccttcggggagcgggtcctctgctctgggcaggggtgagtgggaggcaggaaatacctgactcctggcacagagctcacaaaccgagcttcctgcagagctcaggcaggggacgccagcggatgacgatggcgatgcagcagcactagacagagctgcgggacctcggatgtcccatctgaccctcagttcctgcccctctgggacctggattccaaagttatcggatctcctgatctttccctctttctttctcaccatgtatttttcagcttttgtgacaaactcgtgtttggccttagtactggaaccatccaagcaccgcattcctttagtggggtgggtctgcatgtaaccagcctcagctctcccccaggctggaccgcccccttcagacattggggtctgaagctgcatcgctcaccccaaacttagggctgctcagagctccctatagaggaaactgggtgtggaacggagtaaccacactccctagggcagaggccccagacctgtgtttgatgggtcaaatccacccctacatgtgcagtgccataactgagcctgtgttataaaaatcataaaatgtttgttttactttttttcctcttcttttccccttccccttcctttccctttttatgagacagggtctcgcactgtcatcacccaggctggagtgcagtggcgcgatctcagctcactgcagccttgatctcccgggttcaagcaatcctcccacctccaaagtagctaggatcacaggtgcatgccaccatgcccagctaactttttaatttgttgtagaaatgggtcttgctatgttgccaggctggtcttgaactcctggcctcaagcaatcctcctgcttcaacctctcaaagcattaggattacaggcatgagtcaccgcacccggcctgatcttctgatttttcaagagacgatggaaatctagattttccagtgaaatctcccagcatgttaatgttcatggcaagttctcatgagctcttcaaggtcagatgacactgttgttgaaccccaaaggccaggtttgagctcccgatgcgtagtcagccaaacactgacacctcagtgcttagaagctgagataggattatttaatttagccaaagcaaggggacagaagagagaaactctcaaatctgacctgactttgagcgttagtgggggcttttatgagtaaagtaggtgtgcaggaggtgacctcccgatcgtcaaagctgttgtgcccctcggctcatcaaatttctggatgtcatcaaggaggtctgtgtgacctaaggatcattgttctttgaaagagagacaagttcatttatcttgcaggcagctgccagggagtcaggatgtaagttaaacaattatgagtgaattaatggttacctgctactgaaatgaccaaatgtaactaatcatgcatggaggaaggaaaggacaaagagaaaagaaaagaagtaaaacgaacatcttataatttttataacataggttcagttatagcactgcacatgtaggggtggctttgacccatcaaacacaggtgtggggggcccctgccacagggagtgtggtcactccgttccacaccgtttcccggatgggcagttctgagcagccttaaatttggggtgagcaatgcaacttcagaccccgctgtctgaaggaggtggtccagccttggggagagctgaggctgggtgcacacagacccactccactaaaggaatgcggtgcgtggatggctgcaatactgaaggaagccatgaaagtaacacaagtttgtcaaagctgaaaagtccgtgaactaaactgataaaattcacttagaggtggtgggaataggccgggcacggtggctcacgcctgtaatcccagaactttgggaggccgaggcaggcggatcacaaggtcaggagatcgagaccatcctgactaacacagtgaaaccctgtctctactaaaaatgcaaaaagttagccaggcgtggtggcaggcgcctgtagtcccagctactcaggaggctgaggcaggagaatggcgtgaacccggaaggtggagcttgcagtgagctgagatcacgccactacactccagtccgggcgacagagcgagactctgtctcaaaaaaaaaaaaaaaaaaaaaagaggtggtgaggtggtgggaatagaactttgcaatcattcagaaagcagacatccggcaatgagcatgaaagaaaagtagatcacagttcccaaggaggcttagtgtggtcaaggcctttcagaggggatttcgggtgagcaaaagtgattcaaagtggagaaaagcaggactgcgttgggtgcagtggttcccgcctgtaaccccagcactttgggaggctgagatcggaggatcgtttgagcccaggagtttgagaccagcctgggtaacatggcaagaccctgtctctacaaaatgtttaaaaaactagctaggtgtggtggcacatgcctgtagtcccagttactcagggggctgaggtgagaggattgcttgagcctaggaggttgaggctacagtgagctaggattgcgccactgcactccagcctgggtgacaaagcaagaccctgtctctaaagaaaaaaagaggccgggtgtggtggcttacacctgtaatcccagcactttgggaggccaaggcgggaggatcacttgaggtcaggagttcaagaccagcctggccaacatggcgaaaccctgtctctactagaaatacagaaaaattagctgggtgtggtggtgggcacctgtaatcccagctactcgggaggctgaggcaggaggatcacttgaactggggaggtagaggttacagcgagccaagatcgcgccactgcactccagcctgggtgacagagggaaactccatctcaaaaaaacaacaacacaacaacaacaacaataacaacaaaaaaacaaagcaggactggagagaggtggaatgaagtggcaaggggttcctgaggggtgatttgggacaggacatctaaagccaggtgtacgctcacgtcctcagtcccccaggctcctgcacgggctctgttcttttgcagaaaggccttttccacctcatatccagctccctccagaaattcaagagtcccaggaagtcactctgacctgcttgctgaatttctcctgctatgggtatccgatccaattgcagtggctcctagagggggttccaatgaggcaggctgctgtcacctcgacctccttgaccatcaagtctgtcttcacccggagcgagctcaagttctccccacagtggagtcaccatgggaagattgtgacctgccagcttcaggatgcagatgggaagttcctctccaatgacacggtgcagctgaacgtgaagcgtgagtctccccggcatgcctgtgggaagggcaaggtctgtgtcaccttctccccagccccgcagggggcatgcacccagggcagggggaagcctgcacagacggcggcatcctccagccctggtcacgccgccttgtcagccctggtgtttcgggaaaaagatttgctctagcctaacagaataaaatggtccatcctcaagccatgacatgaattggggattatctggttaggtctttttgttcccctcttggtggggatttttttcgcatcattatcttgtgcctcattcattcaataaatacgtatcatgaacctactaggtaccaggccttattacggctgccaatggggggcatggggcggtgggcagggtgcagcagtgagcaaaactcttgccccacgcggagccagcgctgcagtgaaagagacagacaacaaatggattaccaaagaaatacagagcatgagccaagacattagaatctggaacaaagcaatgttaacaaagaaatatacaacactattgtaggtagtgatatgtgtgttaggaaaaaaataaggccgagagaggggagtgatggagagagacctctctaagaaggtgagcacttaggccgggtgcggtggctcacgcctgtaatcctagcactttggaaggccgaggcggggggatcacaaggtcaggagatcgagaccatcctggctaacatggtgaaaccccatctctagtaaaaatacaaaaaattagccaggcatgatggcaggcgcctgtagtcccagctacttgggaggccaaggcaggagaatgacatgaacccaggaggcggagcttgcagtgagctgagatcgcaccactgcactccaacctgggtgacgagtgagactccatctcaaaaaaagaaaaaaaaagaaggtgagcacttaagctgactggaacggagggagtggctgaggccggcacatatttgggagaggaggatttcagggaaagagaagggcaggttcaaagctttgaggcagcagctgggtgggaggacctcagaggctgaagttcaccgcctctgagggccacatggtaggacaggaggcaggagatggagcaggactctggatcccgagggctgaggtgagggtttgggattctatgcaaagcacagaacccgctcgtggtttccagcaggattggcgaggtctggtagatggtgttaggaaccctgcgtgctgctggtggagaccaagaagtagaggaagtgggagggggaagctgagagccgagttaggaggctgtgaccatcacctgggtgaagggactggcaggccatggctttgtcagaataaaagcactttccacaccctccaccctctgaggattccccgccccctccccgactgcccctctgctcctccagacaccccgaagttggagatcaaggtcactcccagtgatgccatagtgagggagggggactctgtgaccatgacctgcgaggtcagcagcagcaacccggagtacacgacggtatcctggctcaaggatgggacctcgctgaagaagcagaatacattcacgctaaacctgcgcgaagtgaccaaggaccagagtgggaagtactgctgtcaggtctccaatgacgtgggcccgggaaggtcggaagaagtgttcctgcaagtgcagtgtgagcccctcggagctggggacaggccaggcagggaggtagcaggggtggacccggagaggggagccacgggggctctcggggccgtgtgcacaggttgggggtgctctcctcacccctccactcgcctctgccccctcttccagatgccccggaaccttccacggttcagatcctccactcaccggctgtggagggaagtcaagtcgagtttctttgcatgtcactggccaatcctcttccaacaaattacacgtggtaccacaatgggaaagaaatgcagggaaggacagaggagaaagtccacatcccaaagatcctcccctggcacgctgggacttattcctgtgtggcagaaaacattcttggtactggacagaggggcccgggagctgagctggatgtccagtgtgagtagccacggagcctctggttctagggagagaagatggacacagggaacggggaaggcagatggggtgcagggcattccggggtcctggagtcaagagcaaggagcagccagggtctcctgttcacaactgctgtctcagctcctagcatagggcctggctcatggagggtgcttggtagatgcttgtttttttgtgttttagttttttttgagatggagtctccctctgtctcccaggctggagtgcagtggcacaatctcggctcactgcaagctccaccttcccgggttcatgccattctcctgtctcagcctcctgagtagctgggatgacaggcgcccgccaccacgcccggctaattatttgtacttttagtagagacggggtttcaccgtgttagccaggatggtctcgatctcctgacctcgtgatccacccgcctcggcctcccaaagtgctgggattagaggcgtgagccaccgcacccggcctgtagatgcttgttgaatgaatgaggccaggtgcggtggctcccgcctgcaatcccagctctttaggaggctgaggcaggagggtctcttgaacccaggagtttgaaaccagcctgggccacacagcgagataccatctctacaaaaaaatacaaaaattagctgagcatggtggtgcgtgcctgtggtcccagctactggggaggctgaggagggagaatcacttgagcccaggaagtgaaggctgcagactgaactatgttcctgctactgcactctagcctgggtgacagagcaagacctgggtctcaaaaagaaaaagaaaatgctgggactgggattataggtgtgagctgggcacagtggctcacacttgtaatcccagcactttgggaggccaaggtaggcagctcacttgaggccacgagttcaagcccagcctgggcaacatggtaaaaccccatctctacaaaaaaaaattagcctggcatggtcatgcatgcctgtagtctcagctacccaggaggctgaggtgggaggatcacctgagcctggaagtagaggctgcagtgagcctgtgatcatgccgctgcactccagcctgggtgactgagtgagaccttgtctcaaaaaaaagaatggattggccaggcatggtggcttacgcctgtaatcccagcactttgggaggccaaggtgggcagatcacctgaggtcaggagttcgagaccagcctggccaacatggcgaaaccctgtctctactaaaaatacaaaaaattagccgggcatggtggcaggcacctgaaatccacctacctgggaggctgaggcaggagaatcgcttgaacccaggaggcagaggttgcaatgagctgagatcatgtcactgcactctagcctgggtagagtgagattctgtctccaaaaaaaaagaataattaactgcaagataccaggactccatgagggacacagagacttagcgtccctaggcagtggctgagtcttgagagatcttgaaatttttaatgagaactggggcaaactgtctcattacctctccattgtaagacccttttaacacagtgaatcttgttaccatgtagagcacaggacaaaaagaacacataagctcgatccttggaccctgagatgtcatatgtgctaacaggacaggggtgcccaaatcctgagcatctcagacagctggatgcgtgaccacagcagccacagtgatgtttgtggagtgtttgccacacgccacactctgctctaagggagtcatctcatttccttcttgaaacaattcccaggaggttaggaactctcaggactcaccccccacccaccccgcactgcctcttgtttttaagatggagtctccctctgttgcccaggctggagtgcagtggcttgatctcggctcactgcaacctccacctcccgggttcaagcgattctcttgcctcgaccacctgagtagctgggactacagacatgcaccagcatgcatagctaatttttaaaatttttagtagagacagggttttgctgtgttggccaggtctcgaactcctgacctcaggtgatctgcccacctcagcctcccaaagtgctgaaattacaagcgtgagccaccatgcccggcctcaggaccccatttgacagacgtgtaaactgagacctgcagcccatgcccgtgcgcctctcagcagccgtctggcttcagcgctgtgccctgaacccctgcaccaaaccacagccaggccagagagccagggcagggtttctgttctcacacagatgcaggaaggacgcacaagcccccctttgattaatttaggacctgtgcagatgcccgggacaggtagcgggagaagaggaagcaggagggaaggggtactgtggacagctggcttttctttactcacctctctggttttcttccagatcctcccaagaaggtgaccacagtgattcaaaaccccatgccgattcgagaaggagacacagtgaccctttcctgtaactacaattccagtaaccccagtgttacccggtatgaatggaaaccccatggcgcctgggaggagccatcgcttggggtgctgaagatccaaaacgttggctgggacaacacaaccatcgcctgcgcagcttgtaatagttggtgctcgtgggcctcccctgtcgccctgaatgtccagtgtgagtccctgggctaggcagggggatctgggaggtggcccggctgggatgaggggatgaaggcaacgaggccggagcctgggccagtgtcttcaacagaattgagggacaggagcctggcgtcagggccaaggggaggggaggcctggggacagcaaaagggacagggagcggagaggtcagcttgggacccttgccctccagatgccccccgagacgtgagggtccggaaaatcaagcccctttccgagattcactctggaaactcggtcagcctccaatgtgacttctcaagcagccaccccaaagaagtccagttcttctgggagaaaaatggcaggcttctggggaaagaaagccagctgaattttgactccatctccccagaagatgctgggagttacagctgctgggtgaacaactccataggacagacagcgtccaaggcctggacacttgaagtgctgtgtgagtgagggccggaggctgggagtggagcagagaagggaccagtggcctgcctggtagtgacttcgcaccccctccccctgcccgccatgcagatgcacccaggaggctgcgtgtgtccatgagcccgggggaccaagtgatggaggggaagagtgcaaccctgacctgtgagagcgacgccaaccctcccgtctcccactacacctggtttgactggaataaccaaagcctcccctaccacagccagaagctgagattggagccggtgaaggtccagcactcgggtgcctactggtgccaggggaccaacagtgtgggcaagggccgttcgcctctcagcaccctcaccgtctactgtaaggcctcttcctgctcttgttcttcttggtggtggtcagtccttccttccttccttccttccttccttccttccttccttccttcctttctttctctctttcttttcctcctcctcttcttcccctcctcctcctcttcctccttcttcttcttcttctgctttctccctctcctcctcctctttcttctccttctccttccttcttcttcttcttatagagacaaggtcttactctgtcacccaggctggagtgcagtcgcataatgacacctcactgcagcctccaattcctgggctcaagcaatcctttcgcctcagcctcctgagtagctgggactatagacatgcaccaccacatccggctaatttttacatttttgtagagatggggtcttactatgttgaccaggctggtttcaaactcctgacctcaagtgacccttctgcctcagcttcccaaagccctgggattagagccatgagccactgtgcctctccctgtttcctctcatgctcctctctggccctgtctcctccagtgacttcccgaaaagccttccagaccagctggccccttcttccccacctcactgtcccctttcccattcacaccccttgctccaggccatctgccgctgtgctggaggagtcgtcttgtcctgcgtcaccagtctctctttttctacctcccctgcagtctctcctgcctccctctagggtcccctctcaggctgctccaccttccagaagtcctgagctcctactgggtccctgtctctctctctctgactactctgtctctctcagccctgacaggctccttgtttttatcttttaaaacgtaaatgattttttttttaaacggagtctcgatctgtcacccaggctggagtgcagtggcgtgatcacggctcactgcaagctctgcctcccgggttcacgccattctcctgcctcagctccccgagtagctgggactacaggcgcctgccaccatgcccggctaattttttgtatttttagtagagatgtggt[134 bp omitted]cacaggttggagtgcagtggcacaatctcagctcctgcagcctcgaccccctaggctcaagtgatactcctgcctcggcctccacagtagtaaacttgagtggtttttaaacagatcatacaagcacctggtaaaaaaataaaatgtaagcatgaaagggtaaatagtggaaagacagacgcggctcactcttgatccctgagaactctcatccccaccaaaggtcctcactgcacacagtcttcccatctcactgcacacagtcttcccatctcctccaggggtatttttcacacgcacaattcacacacagaggtctgtgcctatatacccttcctcatgacacagacgaggcagagcccacactttgcctgggaattttctttgcttttttccatgtaataatactgtttggacattgttctgtatctatgcatacacagagtgtctaaagtctggaggctgggcatggtggttcatgcctgtaatcccaacactttgagaggccatggtgggaggatcacttgagcccaggagtttgagaccagcctgggcaacatagcccacacctcatagcaggatctcatctctacaaaaaataccaaaaaaaattttaaaaacgaacaaacaaaacaataacaacaacaaaaaagagtctgaaagcatatggaagatacctaattaatttattgtactttttcag[136 bp omitted]cttgaggccaggagttccagaccagcctggccaatggtgaaaccccatctctactaaaaatacaaaaattagctgggtgtggtggcgcgcacctgtagtcccaactactcgggaggctgaggcaggagaatcgcttgaacccgggaggcagaggttgcagtgagccaagatctcaccactgcactccagcctgggtgaaagagcgagactctgtctcaatcaatcaatcagtcaatctagggaaccatcaccagcacggccgaaggccaaaggaaaacatctgaaacatgttatctggaaatgtaacagacacatcccatcatataaaaccattgttccctgggtatcccctttgcagacagcctgagagcctcctctttttcctggggccatggagtcctcgcgtatgaaggttgcatacatcctcctcccagtgccctcttcagggcctaggtctgcagcctcttgttttgggcacgcctgcaaggacagttgcaagatgcattcccatgtggaattgctgggtggaagacaggtgcactttcagagctgatcacacagctatactgccgtgaagagctgcacccatttatgcgggtgcgggtcacaggctctgggcgtgccacgtctgtgggaaaagcagctcctcaggagaattagtgccttattcctaaagggaggcccagagcaagcaggggccgttgtcaccctcttcctctgcacccctgcacgcatgcaggggagaaggacgagtctggctgcagagagaagtccaggatgccttccaggcaaaggctgccagggagagctggcccctcagttgattaaggtctctcctttctccacccagatagcccggagaccatcggcaggcgagtggctgtgggactcgggtcctgcctcgccatcctcatcctggcaatctgtgggctcaagctccagcgacggtgagctcctgccatcccccaccacctcctctatcccttggcagaggcccgtgtccagttgctccatctcgaagcctccagcctgtggagtccctgaccctcacacatgtgcctttatttctcagttggaagaggacacagagccagcaggggcttcaggagaattccagcggccagagc[131 bp omitted]gtgaaaccctgtctctacaaaaaatattttaaaaattagccgggcgtgatggtccatgcctgtaattccagctactcgggaggctgaggcaggagaatcgcttgaacctgggaggcagaggttgcagtgagccaagattgcgccattgcactccagcctgggtgacatactgagactctgcctcaaaaaaaaaaaaaaaaaaaaaaaaagggtaggcatgaggcagactgtgaagctgagtggggaaacaaggtgaaggaaggggataaaatgtcctctgaggagacctgggctgtcagaggccagggaaggggacgagggttggggaacaggtggttagcacttcatcctcgtctccctcccaggttagaagggcccccctctctgaaggcccccactccctgggatgctacaatccaatgatggaagatggcattagctacaccaccctgcgctttcccgagatgaacataccacgaactgggtactgagggtaccaggagggtgaccctgcaccctgggagggaggcgggaggaaaagctctgtcccgcctgccctctttgtgccaggcccatgccaggcaccctgatacatgctctgcctcattcccactcggcaacaagcctctgggtaagggccagtctccagaagtggacctgctccttcaagtcagcagcacacatgcccagtccgttcttatcacaaagatcaagacctcatgatacacacccacgcctactccctccacgcacatttgcacgagctcctactgtgagctttgggcactggggaggccacaggttttacataaggggctgaggttggggtgctgttgggggctctgggtgttgagagggaggagagttcgtgggagatgcttcatgcgtggtcgtctatctgccctgtctctcagagatgcagagtcctcagagatgcagagacctcccccggactgcgatgacacggtcacttattcagcattgcacaagcgccaagtggtaaggagggtctccccaggtctccccagaggggctgtggaaggctggggacagggcctggcctcagtggtgggtcccacataggaaggagttgggtaggcatccgtggtggcagaggttgggtgttggagacggttgctccggcagagctggccagagccaggcaggtacctccaggtcctggatgccggccacagccagtttcctgacacgaggacacccgcctgggcttttggacccccgggtggaatgaaggagagaatgcggagaaaagcggcggtggaggctggcgacagtggggccaggctaaccaccatgcggttttctcagggcgactatgagaacgtcattccagattttccagaagatgaggggattcattactcagagctgatccagtttggggtcggggagcggcctcaggcacaagaaaatgtggactatgtgatcctcaaacattgacactggatgggctgcagcagaggcactgggggcagcgggggccagggaagtccccgagtttccccagacaccgccacatggcttcctcctgcgcgcatgtgcgcacacacacacacacacgcacacacacacacacacactcactgcggagaaccttgtgcctggctcagagccagtctttttggtgagggtaaccccaaacctccaaaactcctgcccctgttctcttccactctccttgctacccagaaatccatctaaatacctgccctgacatgcacacctccccctgcccccaccacggccactggccatctccacccccagctgcttgtgtccctcctgggatctgctcgtcatcatttttccttcccttctccatctctctggccctctacccctgatctgacatccccactcacgaatattatgcccagtttctgcctctgagggaaagcccagaaaaggacagaaacgaagtagaaaggggcccagtcctggcctggcttctcctttggaagtgaggcattgcacggggagacgtacgtatcagcggccccttgactctggggactccgggtttgagatggacacactggtgtggattaacctgccagggagacagagctcacaataaaaatggctcagatgccacttcaaagaaccagtgaactcttttcagtctgtggagtcagagtggggatgaggagaggggaaagtcttcatggggcctggggggaaggaaatggagtcacagtggtttactgatcaaaccagcagattagagagtctggtgtcttgttaggaaaagcatactggctttgcagacagacaaacatgagaacttgaatcttgattcttcggcttaactagcccggtgatcttggcagggctcgccagcttgcctgagtctcggcttctccatctgtaaagtggagagggaaaggccactgcctaccacgcaggtggcccacgataggaagtgaggcatcgtcttctatatgctggagccacattgagacccagcacagaagccgaaagtcccccagaaaaccaacctccatcctttatttgcatttttcgaagaatgtgaaaaggggaagccgattcaaaacagctcttcccaaaagtgacgctacccaattcttgcacaacccatagctgccagagaaagtcttgaagaccagccaccctgagaaacctcacagcttttctgtcattcgaggtcctctgcacccgttctctaattctgttcactgattcagactttccagttaggtgccccagctcccctctccgcttctcgggtttgatctttctccacccattcacctgcttctgcaaaggggctaaagcccattctccttagagggcaggggtgtaattatctgatcatcagggagattggctcctggcacgtggcaggtgtccccaaactgccaccttcctctcccaccttcctttccctcccatctctgctcagtacccggacggtaactctaggaattatggttcagggaggccttgatcgccccatcaatccactttgtccctggtttgattcttgtgagcaccattaacttttctggaggaaggtgaggctttaagaactgtttaaagcccaggcgtggtggatcacgcctgtaatcacagcactctgggaggccaaggtgggcagatcacctgaggtcaggagttcaagaccagcctagccaacatggtaaaatcctgtctctaccaaaaatacaaaaattagctgagcgtggtgattcacacctgtaatctcagctacttgggaggctgaggcaggagagtcgcttgaacctgggaggcggaggtagcggtgagccgagatcacgccactgcactccagcctatgcaacagagtgagactccgcctcaaaacaacaacaacaaaaactgtttaaatgagacaggagggtgttggggtgtctgtgcccaaaatggggtctggtgtcattcaactctttcttcattcattctgcacacagatactgagcacctggaaatgcacccagtacagagccagttgttaggacaccaaaaagataaggcgtaggaccaaccttggggatctctagtcgagagccgccaagggtttttaaggcaagataccctggagggagctgaggcagtcctaagcctgaagggcctggcttaagctccctggcaaccatcgagcatcttccccttcccaccctgtccctcagcacagctgctgacataaacctactacatggctgattgaccatgagatatggccatcaatagacattgctgaggcgtgaagagcaggtgaagagcaggtggccaggaagctagggggccaggactccagacgcaggccgccctccacaaccccagctctcacagtcctcccagggtccagacaatggatcgtgcatttaggttcccaaacacctgctgtgcaacgtgtagtagacaaagcagaccaaagcctttgccctcaggaggccggcattctagctcaggagccagccaagacgatgtcgcactgaagaaagacaacaaaagtgagattcacaggagggatgagtgtggctgaggcacccgggaaggccctcggagaaggtgaccttgggcaaagatccagacgccaggtgggtggggccaaagcagagaagatctggaaaacccaatggctccccagggcttcgctcttgctgcaggaggggaaaccacactgctgtggattcttcctccattctgtccatttctcagttcccaacaacacactgaacagtaggaggccagttctccgctcacagcgggcgctgcaccccaggtgctgctctcgagaaaaaggcgagcatggaccaatttagtggctccgaggtatgaaaagcagtgagatggtgtctttgagggagttagtgataggctgagacccccttgctgtcccccctgaagcctggtgaccagagctgccaggaggccacacagagagaggtttatgatgggggacctggaattcggaaggggcagagtggtcaggtgacccatacacgcctgagaaaactgatgtggagagctgtgttgtcattctgaggcaggaaatagagacagactgacagacagacagaaagacacgggcacattgagagacagagacagaatcacagagcagagctggcttctcaccagcaggcgtgggcacacctgagagagcatccagagaggttagaaatcttccttaggtcctcctgggaggctcaggtgaccccagtgggaaacatgaaaggctgggaggacttccagggctgagagaaggaagctacgcagccggccggtgccacattccctgtgccttggggagtgtcccccagtgtccccagccatgcaccctggggggagtcggcttggacatctgtgccaccccttgacaggcagagtgggggccacaacctgggccctccagtgctggtcagcagaggctgcccccgccccttgccttcctcctcccgctccttcctccagccctgggaaggtcggaagccaccaccatggggctagtgcggaagcagagggagaacagaggggccctcctcgcaaaaactaaaacaagcccacagcctgtgcagaaccgcacccgggtgtgatcactccttaccccacacacccactgccacttggagatggcttcatggctgcagtcacagggcaccctgtgttgtcaggggtgagccagtgaggcccgggacctgcccaggggtgcatcaagggtggagaagacctggccccagcgcaggtgtgaacaggcaggagggctggggagggaatagcgctgggttgtggccgagcccccaagccctgctcttgagaggcactggctacacactcggcccctacccagacaggaccccaattcctccctggcccctctgtgttcctgcatcttcccagcccctcacctcctctggcgtggcctcacctccagccgggatgccccattagctgctcacccaagctgctagaacctcaggctaatggccctgtcacccgccctcctccccttccggctcactgcccatcccgggcatcctccatcagcccgctgaggggactgctgagcctcagagacatctggcagcaccaggaggtgggtccctctctctgtggctcctctcttcacctgactgttccccagacccccagaccccctgcccaggtggcccctgagaactgctaagctcaaccgtgacatggatggggcctggctgacccttgggctctccctgggggacccccttttcctgtccctggccacaccctcaccttatccacacccttctcctccctgctgccccgccggctttccaatgtgggtggggggtgggggcagctcctgccttgccagggaaccagggagggcagtgggctcaggagtcaaactcccattcccagggaaggctcaggctgtgggcccagccctgttctgaattctctccacccctcctccccacagagtctcagaaatcgagaagctttcttcctctgggacctgtgcgccacatcctatctcctgtgacgctgcaggagcttccctggttttaagaggtgacatggtggagagaaagcacaggactgggggccacaggtcctggcttctcatccaggctccgctgctccctgactgctgcctttctctgtgggcctcgtttcctccctgatcccaccaggtgaattgtaattctccacacagggctggaacccgcgagtgatcccaggagcccctcctctccggggccccaagatctgaggacagggagccaggttgcacacaggagccgtgcaggccaggacggcggccccatggacctgcccccgcagctctccttcggcctctatgtggccgcctttgcgctgggcttcccgctcaacgtcctggccatccgaggcgcgacggcccacgcccggctccgtctcacccctagcctggtctacgccctgaacctgggctgctccgacctgctgctgacagtctctctgcccctgaaggcggtggaggcgctagcctccggggcctggcctctgccggcctcgctgtgccccgtcttcgcggtggcccacttcttcccactctatgccggcgggggcttcctggccgccctgagtgcaggccgctacctgggagcagccttccccttgggctaccaagccttccggaggccgtgctattcctggggggtgtgcgcggccatctgggccctcgtcctgtgtcacctgggtctggtctttgggttggaggctccaggaggctggctggaccacagcaacacctccctgggcatcaacacaccggtcaacggctctccggtctgcctggaggcctgggacccggcctctgccggcccggcccgcttcagcctctctctcctgctcttttttctgcccttggccatcacagccttctgctacgtgggctgcctccgggcactggcccgctccggcctgacgcacaggcggaagctgcgggccgcctgggtggccggcggggccctcctcacgctgctgctctgcgtaggaccctacaacgcctccaacgtggccagcttcctgtaccccaatctaggaggctcctggcggaagctggggctcatcacgggtgcctggagtgtggtgcttaatccgctggtgaccggttacttgggaaggggtcctggcctgaagacagtgtgtgcggcaagaacgcaagggggcaagtcccagaagtaacgccactgctcgggggaaggagcatggggcaggagggcccggctgcttctccaggcccctgcggggggctgcttcggaggaactgcagggcagcctggcccggaggcctccctggagccactcaagcagagagcggcgcctgctgagggcagcaccccagtcaagagaggagcaccgagccagagcacggtggcagggggaggtaagtttgcccctgcacgtgtcgaggaagtttgtcccttcctcgcctatctttctctcccctctgcacgtcctcacctgcctgtcttccgtgggccgcgagcagaggccttgtacttacgggaaggaggaggcagtctgtttctgacccacaggaactgccactccggtgatgcacttgaggacagctactctgaaatcagttcccaggagagaacatttgatttccgagtaggagaggaggcaggaggcaggataatgacgctgttataccatgtgaaactcgcaagggggcagccttggagcttggaacggaggctggcaggaaaagatgcttcagccggggagggaaaatgcaaggtcccgcagtgatgggcaaaggctacggagttgactcttgaacaacgtggggatggggtgccgaaccccacgcagtggaaaatctgtgcatgactttgactcccccaaagttcaactactaatagcctactgttgaccaaaagctttacccagtatataaacaattgagtaagacatatttgaagccaggcacagtggcttatgcctgtaatcccagcactttaggaggccgaggcgggaagactgctcgaagccaggagttcaagagcagcctgggcaagatagtgagacccccacctctacaaataataaaaataaaaataattagctgggcgtggtggtgcgtgcctgtagtcccagctactcaggggtctgaggtgggaggatcccttgagcccaggattgaggctgcaatgccatgatcgcaccactgcactccagcctgggtgacagagcaagatcctgtctctggaaaaaaaagaaaaaagacatattttgtatgttatatatattatgtgctgtattcttacaataaagtaagctagagaaaagtacatgttactgaaaacattattagaaagagaaaataccttcacagcactgtgctgtatttatcaatactgtaagttttgttgtctgtttataagagaagttgtctgtctcaagcggcagtaaccgcggctgcagatctcaatctgtggtagatatcaagcagttcaacccttttttataatgtcatgacttttctttgcttcttggaagcagctctggcatcactagtggccccgcatttggggccaagggggttattcaaagtttacggtattgcattaaacatggtgaaacatatgcaatgactatgaaagatcactttttacttctgtacacagtgtactggcgagaactgctcaccaggaggtgattagcttcacgtggtgttggaagcagatactcaacagttgagctcacggagaaagcacaggaggtggctacgaaattattataggagtacagtatgtctacagtaaatatgcacttatgactttaatactgcacatctttatgtttgcttgcatttctcttgacttcaaatggcatcaaatagagtttgtgtttgcgtgcatatatttttgataaattttaacttttttgttttgttttgtttttagacagagtcttgctctgtctcccaggctggagtgcaatggtgtgatcttggctcactgcaacctccgcctcccaggttcaagcaattctcctgcctcagcctcccaagtggctgggattacaggcacctaccaccacacctggctaattttttgtattgtaagtagagatggggtttcaccatg[131 bp omitted]gggcaacatggagaaaccctgtctttaccaaaaatacaaaaaatttagctgggcatggtggcgtgtgcctgtagtcccaggtacttgggaggctgaggtggaaggatggtttcagcctgggacgcagaggttgcagtgagccgagatcatgtcattgcactccagcctgggtaatagagccagatcctgtctcaaaaaaaaaaaaaaaaaaagctttgtatccattttggcatacatagactagtatgtatggcagtaaatagactagtggcagtaaatagactagtacctacatatattttttgtattcgtggcatacttaacttttgcttaattttaaaaatatatttctaggcttgtagttcctctgtaagttttttcaaattgttgcaaatctctgaaaatgtttccaatgtatttattgaaaaaaatccacaagtaagtggacctgcacagttcaaacctgtgctattcaaaggtcaactatatagtctgtaatacgtgatgggtgtcacgctgagtgtctacagtgagtgttgtctcacttcagcttcacacaacgctgtggtttagccttgccactgccgtacggatgagcgggtgttcactacacgaaggtactgggcagaggagcaaacactgactaaattctagcctgtgctttgctcaacaagccacatgcctgccttgcttgcatcaagggaaggagtattgtgttctaatttgaagaaatacaccagccactccttaggcagcacttggtgcgggatgggctcctctggaaagggagcacctaatttgcacaaaggtgctgcaccaggtagctacgatcctggaatgggatgaagaaacttgcctaaggccctacagcaaggaaggggtaaaagcaggatgtgatccttccaagcagaacccccaagagccaggggacatttgggaaacctgggggtgtgggggttaaccctgtatttgtggtccatttcgcaaaggatagcatcccacatccatgagagggaggtcagaagggagtggctgtggctgtgaaggagacagacacctgggcacctgctctaaattacagcaatgccatgcacatgatgatgtattggagcacaacaaatggcagccaccagctggggtgcacgcaccaatttctacaaatgagctctgttcaggctgaaatgtctacgcatgcaaggatttttcttgtaattgatgatatatccccagcgcccagaagacagagtggcacgcagtaggtgctcagtaaatgttcgctcaatgaatgaatgaatgcctctactagccttccaaagaaagttctatgtctgttttatcaatatggaaacaggccagagaaattaagtaacttcttttggaagccagaaacaagcccggcacttgtgcagtgacaacaccagggaatttcagtaaaaacccaaactccaccccagggagccccagtgcctcctcccgcatcacagggtgccagggcccactctctttgactcctgctccatagcccctgctgggtactgggctgcttctcccagttcctcctgcctccccccacttagggcaaatccagtgcctccctggggcccaggagactcagtgtgatccaccccaggcgcctctcactcctgtgagacccaaacctcctatcagctcccccagcaggccaagtctgtgcacccgtgactcccctgccccaatgttccctccagtggctctttgcctcttcagtatccacgtcttcatgatccttcccctactccatcccccaagccctcaccaccaaatgtaatgtaaacagcatgacagcaaaaactttttgttcacaactgcgtgttgttttttttttttttttttttttttagacacagtctcactctgttgctcaggatggagtgcagtgacacagtcatggctcactgcagccttgaattcctgggctcaagcgattcttccatttcagcttcccaagtagctgggaccagaggcacatgccactaaacccagctaatttcttttttctttctctcttttttttttttttttcccctgtggacatagggtctcctcatgttgcccaggctagtctcaaacaacctgtgctcaagcaatcctcccacctcagcctgccaaagtgctaaaattacggacctgagccaccgtacccagcctactgctgcacttttaacagcttaattgagatattatgtacatatcatcaaattcaccaatgttaagtgtacaattcaatgatttttagtaaatttactgaggtgtgagtccattaccatcagctagttttagaacattttcatgaccctagtaaaggattttacttcatgttcatttaaacttaatcttgggccaggcggggtggctcacgcctataatctcagcattttgggaggctggggtggacggatcacctgaggtcagtagttcgagaccagcctggccaacatggcgaaacctcatctctactaaacatacaaaaattagccaggcgtggtggcgggcacctgtaatcctagctacttaggaagctgaggcatgagaatttcttgaacccgggaggcagagtttgcagtgagccaagattgcaccattgcactccagcctgggcgacaacaagaccctgtctcaaaaaaaaaaaaaaaaaaaaaaaaacaacttaatcttcatttctacctccatcccccagacaaccacgagtctactttctgactctataactttgcctattctggacatatcatataaataaatgaaatctgacaatatatgtacatggtcttttacgtctggcttgtttcactcaacataaggctgtagtgtgtatgggtagctcattccttttctttgccaaatagaattccagtatatggatgtgccacttttttattcactcaccagctgatgggctgccaggtaacatttccactgttggtgactatgaccaacactgctgtgaacatttaggactgagtctttaagtagacctgagtttccacttctcttaagtaaatacctacggtggaattgttggatcgcatggtgaatttatgtttaactttttaagcaactgccacctgctttccaaagcagggacaccacctcccattattctcaccagcagtgaatgaggcccctatctctctacattctcgccgaccataggcattgtctgactttttgcttgtggccattctagtggatgtgaaatcatatctcattgtgccctgtgattgtttgaatgaactaatagatcacctgtgaaactggacagcacttgggtttgaaccctagtggtgacatttcacaagctgtatcacctggagcaagtcacttccctacggtgaaggacaaggattttatgacataaaagcgttgccctagaagcagtgtctgctatggattatgtgcccatgaaaaggcagctgctgtcatcatcgccaccaccattattattgttattattattacattgtcaccccagagataatcctgcaccagtgacagggaaaatagcagctggcatccgctgcctgctcacgaccacacgccaggcttccgtcaaaccactcaacatgtattagtaatcttttaatcgacctacatattgttttaatttgcatgtgttaatgcgttgatctatgagatgggtattatgatgagctctgttctgcaggggagaaagcagaaacatggagaatttaagtcatttcccccaaatcacaaagtcaggaagaaacagacctcacggagctcgctctctgtcattgcatcacacttcctgcccttacaaggcaaattggataaatgccattctagagaagcagacaaaattcaagtgaagaaggggagaggaagacgtcggctggggcctgcttagagcatcccagctgagactgcatgaggagggaggcacgcagttgtggaatttgttccccttttagcatgctgaccagccctggcaacggagctcaaggcatctatgtgccactgctcaacagtgagtgacgtcatgggcacggccaggtctttatcagttctgccggataaatagccaactgcactaggtctggagagacagcaaggtgctgtgcggcagagcatttggggtctcaaagaagcaggtgagcctgggcccgaggggctgggtggaggagcaccttggtgcttctctgctggggaagggacaggggacagggcatgctcaggaagacaggcaggctgaccccgcctggaaggcacccagagacaagaggggtgggcgtagtgacctcgtgcccttttaggggagatgctgctggccagaggccgttagggcccccactaccaactccatgttactctctctcaccagtggccaccaccatggatacaggccccgaccagtcctacttctccggcaatcactggttcgtcttctcggtgtaccttctcactttcctggtggggctccccctcaacctgctggccctggtggtcttcgtgggcaagctgcagcgccgcccggtggccgtggacgtgctcctgctcaacctgaccgcctcggacctgctcctgctgctgttcctgcctttccgcatggtggaggcagccaatggcatgcactggcccctgcccttcatcctctgcccactctctggattcatcttcttcaccaccatctatctcaccgccctcttcctggcagctgtgagcattgaacgcttcctgagtgtggcccacccactgtggtacaagacccggccgaggctggggcaggcaggtctggtgagtgtggcctgctggctgttggcctctgctcactgcagcgtggtctacgtcatagaattctcaggggacatctcccacagccagggcaccaatgggacctgctacctggagttccggaaggaccagctagccatcctcctgcccgtgcggctggagatggctgtggtcctctttgtggtcccgctgatcatcaccagctactgctacagccgcctggtgtggatcctcggcagagggggcagccaccgccggcagaggagggtggcggggctgttggcggccacgctgctcaacttccttgtctgctttgggccctacaacgtgtcccatgtcgtgggctatatctgcggtgaaagcccggcgtggaggatctacgtgacgcttctcagcaccctgaactcctgtgtcgacccctttgtctactacttctcctcctccgggttccaagccgactttcatgagctgctgaggaggttgtgtgggctctggggccagtggcagcaggagagcagcatggagctgaaggagcagaagggaggggaggagcagagagcggaccgaccagctgaaagaaagaccagtgaacactcacagggctgtggaactggtggccaggtggcctgtgctgaaagctaggtcctccgggggaggagggtgtagctggcatgtcatcctcagggcgcttcctcgctcacgccaggagggacttggagtggcgagctggggcccgatggggcttgggggcagagtagacatctagcctccctaagggtatgcgcgctaaagcccagctctcgatctcacctccatccccatccacccacacactatggattgggctctgggaaggggtcagggtgagaggctgctctggagaacaatgaggtcctcatagcagcaggcagctcctgtgttttcttgagggtggcagaggagctaagagcagtgcccagggtctgagggggctgcccagtgagtggcaggggcaggagaggggagaaccccatcctcagagctgctcccagccagcgagtcaggagcgggggagacagggctccagggatgaggccgcattctgctcccacagcgccttttccagaaagttcccattgctcaataaatgtggatcatcagagacatttatgaacaatgacagaagaaaaattacccaaataaatgtggaagcaagcaaaagagaacagtgtttccttcttctcctgttttgttctggtggtgtgcttgggccgggtgggactggtggatggaaggagaaaacaccagactctggaggaaaagggccaaacaccaggatgcctggatgctgggagaggatctggcttgcagggatgaaaataacagctgccctgtctaaaggacttggcctgacacatcatctccttctatctctcaatagccctgtgagaggtaccagcattatccccagtttcagatgaaggagtggcccagagaggtgacacctcctacctgagatcccatagctggtgggcgattgaagtgggaccagaagctggtgtcagttgactctgacacccatgcccctaagccactctgctgttctccatctgtgtgtcacctgtggtcacctggcccagtcaaatgtcccaagtcagataagtctgtctgagcaggacaaatataaacaggccatgataagaaacagaactaaatgcaaagcgtattgactatttgtgtgggttcaaccttttcccagtaaaaaagccctcttggaaaaaaagaaaaaaagataattagtcagcacaatggacttcaggtttctgcaaagtcagagagatgttcctcagagctctattcatcaaaatatggccattcaggaagttttcatgttccctgagtggtggcccatgagaaatagctggtcaggacctcctccccaagcaaggccacctgagactcgccagcccctgtttgcatgctgtcagcagtatttcagaagcatttgttgaacacctattgcatgcagatggctgggctcagaacttcggggagttcgacactaaggtctttaaatatctgcttcctccctggggttaagtgtgccgggagaatgaagactggctgtgtgtggggaagtggatttcaggtggaaggagagggactctgtggagagttgaaaccatgagctgtctctctgtcccacggctcacctgtccatccccagggcactcagccctggtggctgcaaagaagttgatgcaggtaggggtgttcatggctcagaaaggggacaaaggtgccatggaatcctgcaacttcagaatgggcaccgccaccccaaggcagagaacagaaaaactgaaaacctcacagtcgaaagagagccatgaagagctggagtctccctcctcccccaggtttataagagggaataagaggcagcttcatgggctttgctgtccccagctatctcccagcccagcccagtctgtataagcaaaagcccaggggtggggaagatgaaaagccatcagggtgtgggtgatcgtgggagtgggggtgaggaggatgttggagcattttccatacatctcagaagcccagggaacggggctgtcatagaacgggagatgcatctggggctgccgcttggtgccatctaggtggggtgggagaaaggcagagagaggaggtgggagaagactgtggggggtgcagcagctggcaccctctccatcgggcagagcaagtaggtgtgaatctcccatgggtgaagcgatcacacgcaaaaaggagggagatggcatctttggagggaggtggtgataggctgagaccccctcgttgtcccccccgaaacctggtgaccggagctgccaggaggccacacagagagaggctgatgatgggggacctggaacctggaaggggcagagtggtcagatgacccacacacgcctgagaaaacagatgtggagaggctgtgttgtcattctgaggcaggaaacagagacagacagacagacagacagacaccggcacagtgagagacagagacagattcacagagcagagctggcttctcactggcaggcatgggcacacctgagagagcatccagagaggttagaaatcttccttaggtcctcctgggaggctcaagtggccccaccggggagctgaacagctggctggatttccagggttgagagaaggaagctgcgcagccggccagggccacatcccctgtgcctcagggagggacccccagtgtccccaccacactccccaggaggagtccttggagttgaggccactgcctgagtcctccagtgccagccagcggaggttgctcccgtcccttgtcttcctcctccccatccttctgccagccctggaaaggtcagaaaccaccattgcggagctagaggggaaggagaggcagaacagaggggcctctcctcgcaaaaactaaaataagcccacagcctgtgcagaaccgcacccgggtgtgatcactccttaccccacacacccactgccacttggagatggtttcacggctgcagtcacagggcaccctgtgttgtcaggggtgagccagcaaggcccggggcctgcccaggggtacattgagggtggagaagacctggccccagtgcaggtgtgaacaggcaggagggctggggagggaatagcgctgggttgtggccgagcccccaagccctgctcttgagaggcactggctacacactcggcccctacccagacaggacgctgattcctccctggcccttctgtgttcctgcatcttccaagaccctcacctcctccagtgccgcatcagctccagccaggatgccccatcagcttctcacccaagctgctagaacctcaggctaatagccctgtcattccagctcactccccccgtccccttctggctcactgcccatcctgggcatcctccatcagcccgctgaggggactgctgagcctcagggacatctggcagcaccaggaggtgggtccctctctctgtggctcctctcttcacctgactgttccccagacccccagaccacccctgcccaggtggcccctgagaactgctaagctcaaccgtgacatggatggggcccagctgacccttgggctctccctgggggacccccttttcctgtccctggcgacaccctcaccttattcacacccgtctcctccctgctgccccgccggctttccactgtgggtgtcggggggtcagctcctgccttgccagggaaccagggaaggcagtgggctcaggagtcaaactcccattcctagagaagactcaggcagtgggcccagccctgttctgaattctctccacccctcctccccacagagtctcagaaatcaagaagctttcttcctctgggacccacgcgtgaagtcctatctcctgtgaccctgcaggtgctcccctcattttaagagatgatgtggagagaaagcacaggactgggggccacagcttctcatccaggctccgctgctccctggctgctgcattcctctgtgggcctccgtttcctcggtgatcccaccaggcgaattgtaatcctccaggcagggctggaacccatgagtgatcccaggagcccctcctctctggggcctcaagatctgaggacggtgagccagttgtacacaggagccgtgcaggccaggacggtggccccatggacctgcccccgcagctctccttagccctctatgggaccacctggcttgtttcacttagcgtaatattttaaagattcactcgtgatatagtacagcagtccccaaactttttggcaccagggactggttttgtggaaaactatttttccatagacctcaggggagtggggggatggttttgggatgaaactgttccacctcagattgtcagacattatttagattgccataaggagcgcgcaacctagatccctcgcatgtgcggttcacaatagggtttgcgctcctgtgggaatctaatgctgccgctgatctgacaggagctcaggcggtcatgccagcttgtctgcccactgctcacctcctgctgtgtggctgggttcctaacagaccactcacctgcacgggtctgcagcccggggttggggagctctgacgcagtaggtataggcagctcattcctttttattgccaaatagaattccagtgtatggatgtgccactatttttatccactaactagcagaagggcctccaggtgaggtttccacttttagttctttttctttttctttcttttcttcttcttttttttttttatactttaagttctgggatacatgtgcagaacatgcaggtttgctacataggtatacatgtgccatggtggtttgctgcacccatcaacccgtcatctaggttttaagccccacacgcattaggtatttgtactaatgctacccctccccttgccgcccatgccccgacaggctgcggtgtgtgatgttctcctccttgtgtccatgtgttctcattgttcagctcctgcttatgagtgagaacatgcagtgtttggttttctgttcctgtgttagtttgctgagaattacttttggttcttatgatgtatgctgctacaaacattgaggactgagtctttgcttagacaaatgttttcacttattttaaataaatacctatggtggaattattggatcacatgttaaattgatgtttaactttttaagaaactgccacctgctttgcaaagcagctgtaccatctgacattctcagcagcaatgagaggcccctgtttctccacatcctcaccatcacttgttattgtctgccttttgcttatagccattctagtggatgtgaaatggcatcattgtgctccgtaagtatttgaatgaagaaataaattacctctgcactggagagcacttgggtttgaacccgggtggtgatatttaataagctgtatcacctggagcaagtcacttccccactgtgaggcacaaaggatttcatgacaataggggatgccttgagaagtggagtatctctggatctgtggattatatgcctaccgaaaagcagttgttatcatcaccaccgccaccattattattattactgtcaccccagagacatgcccacacctgtgacctggatgctggcagctgacaggtgctgaacacacaccatcacatgccaggcctccttcaaagtacttgacacagctcttatatgggatttcacaaagggcggcacccaactctccctcactacaggagcagcagggtctcagcaatgtaggacagttcacagagttgcatgctctggacttggggtagagactctgccatgatgcctatcttaattgtagctggcagagaggcggatctacagtccacaacagcactttggctgggaaccaaaggatgaagactttataaccagaaggtcatgtgccatgtaacaggggtgtagggaagtagatcatgcttctgttggcttaggacaaggagctggtgcaccccttacccctttctgtgtcacttcagagcaccccatcacgatctcttcctgccactcctgtcaaggaaggtgtgaccactgggccctggcctacctgccagctcttcttaagtgccatctactagacttcagcttaaattgcaccacgaaacaaaaatatattgctacaacatgcggcatctgagaaagcaaccgcatgaacctatctgcaaccaagaacttgtacagagccttggccctccgaaagcatccagaaatgaagccagttgatcatacacaacacacaccatagtcataccttcaacagaaaaaaagaataaaaaaattaaaaagccccacccaaatgaaagcaaattttgaaaaagaagcatcagccctctcagatgagaaggaatcagcacaggactctggcagtacaaaaagccagaatgttttgtcacctccaaaggatctcactagctccctagaaatgtatcctgaccaaattgaaatgctgaaaatgacagatctagaattcagaatgtgagtggcaaggaaactcagcaagacccaagagaaagttgaaatgcaatactaagaagccgtaaaaatgagccaggatgtgaaagatatatatatagggggggaaaaaaactatatatagagagaaagaaccaaaacacaaaaagaatcaagcagaacttctggaattgaaaaatttactacaggaatttcaaaatactgttggacacctcaacaatagactagaccaagtagaagaatttcagaggcagaatgaattttttaaattaacctagtcacacaaaaataaagaaaaataattttaagaaatgaacaaaggctttgagaagtataggattatgggaaatgaccaaactatgacccactggcattcctgacagagaagaagaaaaaataagcaacttggaaaatgcattttaacgtataattcaggaaaatgtccctaatcttgctaaagaggtcaacatgcagatataagaaattcagggactgcctgagaggtactatacaaaatgaccatccccaaggcacatagtcatgagactgcatgaaagaaaaatatctttaaggaagctagaaaaaagagccaaattacctataaaggaagtccactcagaataacagtggatttcttagcagaagtcttacaatttagaagagattgggtgcctatttttggcttcttttttttgatggagtcttactctgttgcccaggctggagtgcagtggtgcgatcttggctcatggcaaactctgcctcccgggttcatgcaattctcctgcctcagcctcccaagtagctgggattacaggcatgtgccaccatgcccggctaatttttttgtatttttagtagagacggggtttcaccatattggccaggctggtctcaaactcctgaccttgtgatccacccacctcagcctcccaaagtactgggattacaggtgtgagccaccacgcccagccttctaggcttcttaaagaaaaaatgccagccaagaatttcatatcctaccaaactaagtgtcacaaaggagaaataaaatctttcctagacaatcaaatggtaagagaattcatcaccaccagactggtccaacaagaaatgctcaaagaagctgtaagcatgaaaacaaaagaatgatacttgctaccacaaaagcacacataagtacaaagcccacagaccctataaagcaactacccaaccaagactacaaagtaattaactaacaacacgaagataaatcacaacagggacaaaacctcacatattaaccttgaatgtaaatggcctatacactccacttaaaagacatagtgtggaaaattggataaaaatatgagacccaaccttctgctgtcttaaagagacccatctcacatataatgatacccaaaccctcaaagggttggagaaagatctctcatgcaaatggaaaacaaagggttgctattgttgtatgagataaaacagactttaaaccaacaacagtaaaaaagcacaaataagggcacttcctaatgataaagggttcgattaaacaagaagatttaacatcctatatatataaacacccaacgctggagtacctagatttataaaacaattactacgatacctaagaaaagagatggacagccacacaataatagtggggttcttcaacagcccattgacagcattagacagatcattgaggcagaaaactaacaaagaaattctggacttaaattggacacatgatcaaatggacctaatagacatctacagaatactctacccaacaaccacaaaatatacgttcttctcatctgcacacagaagatactctaagattgacccaatgcttagtcatgaagcaaatctccataaatttaaagaaatgaaaattataccaaccttcttctcagaccacagtggaataaaaatagaattctcaaaatcacacaaatacatggaaactaaacaactatttcctgaatgactttggggtaagtcattaaggaagaagtcaaaaaattaaggcagaagtcaaaaacttctttgaaacaactgaaaatagaggcacaacataccaaaacctctgggatacagcaaaagcagttttaagaggaaattttatatcactaaatgcctacatcaagaagttagaaagatctcaaattaataacctaacattacacctgaaggaactagaaaaacaagagcaaactaaatccaaagctagcagaagaaaagaaataactaaaatcagagtagagctaaacgaaattgtgacaaataagccattcaaaggatcaatgaaatgaaaaattggttctttgaaagaataaacaagatttataggctgcaagctagattaacaaaggaaaaaaaaaaacctccaaaaaagcacaatcagaaataacacagacaagattacaactaattccacagaaatacaaaagatcctcagagactgcgatgaacatctatattcacatgaatcagaaaatctagaggaaacaaataaatttctggaaacatacaaccaagattgaaccagaaagaaattgaaactctgagcagaccaataatgagttacaaaattgaatcagtaataaaatatctaccacctttaaaaagcccttgaccagatggattcacagccaaactctaccagacctgcaaagaagagatggtaccaatcctactgaaactttaccagaaaattgaggaggagagattccctactcattctacaaaaacagtctgattctgatatcgtaatctggcaggacacagtgaaaaaagaaaactgtaggccaatagcccgatgaacatagatccaaaaatcctcaataaaatactagcaaaccaaatccagcagcatgacaaaatcataattcagcatgatcaagtgggctttattcctgggatgcaaagatgtttcaatatatgcaaatcaataaatgtgactcaccacataaaattaaaaacaaaaattatatgatcatctcaatagatgcagaaaaaaacatataataaaatccaacatcccttcatgataaaaaccctcaaaaaactaaacatcgaaggaacacacctcaaaataataagagccatccaggacaaactcacagccaacatcatactgaatgggcaaacgttggaagcattccccctaagaaatggaaaaagacagggatgcctactcccactactcctattcaacatagtagtggaagtcctagccagagcaatcaggcaagaaaaaggaataaaaggcatccaaatagaaaggggaagtcaaattatctctgttcactgatgatatgattctatacctagaaaaccctacagattcctccaaaatactcctagacctgataaatgactggcagtttcaggatgcaaaatcagtgtataaaaatcagtagcattactatataccaacaattgtcaagctgtgagccaaataaagaacagaatcccaattacaatagccacacacaaaaataaaatacctaggaatacatctaaccaaggaagtgaaagtgaaagatctctacaaggagaactaaaaaacacaaataaatgaaaaacattccatgttcatggattagaagaatcaatatcattaaaatgtccatactgctcaaagcaatctacagattccacccaattcctaccaaattatcaatgtcatttttcataaaatggaatcattctaccaaaaagacacctgcatgtgtatgtttgtcacagcactattcacaatggcaaagtgatggaatcaacttaggtgcccatcaatggtggactagataaagaaaaaatggtacatacacatcacgaaatactatgcagctataaaaaagaatgaaatcatgtcctttgctgcaacataaatgcagctggaggcctaagtgaatgatcctaagtgaattaacacagaaacagaaaatcaaatgctgtatgttctcacttttaagtgggaggtaaacaatgggtacacgcaaacattaaagatggaaaccatagacagtggggactccaaagtgggggagggagggcggaggacaagggtgggaaaactgcctattgggtactatgttcacaattttggtaatgggttcaatagaagcccaaacctcagtattatgcaatatacccatgtaacaaacctgcacatgtgctcccgaatctaaaataaatattttcaaaaagcaattgacctatattattaacattttaatctacctgtatatatgttttaatctgcatgtgttcatgctttgaaatatggtacaggtactatgacaatccctgttctgtaggggaggaagaagagacacatctcttcccccacatcacaaagtcaggaaggaacagacctcacggagtccagtctgtcactggctcatgctttgtgcccttaaaaggcaaactggataagtgccattctagagaatcagacaaaattcaagtggaagagaggggaggggaagaagacgtcagctggggcctgtttggagcatcccagctgaggctgcgcaaggagggaggcacgcagttgtggaatttgttcccctttttgcatactgaccagccctggcaacggagctcaaggcatctttgtgccactgctcaacagtgagtgatgtcatgggcacggccaggtctttatcagttctgccggataaatagccaactgcactaggtctggagagacagcaaggtgctgtgcggcagagcatttggggtctcaaagaagcaggtgagcctgggcccgaggggctgggtggaggagcaccttggtgcttctctgctggggaagggacaggggacagggcatgctcaggaagacaggcaggctgaccccgcctggaaggcacccagagacaagaggggtgggcgtagtgacctcgtgcccttttaggggagatgctgctggccagaggccgttagggcccccactaccaactccatgttactctctctcaccagtggccaccaccatggatacaggccccgaccagtcctacttctccggcaatcactggttcgtcttctcggtgtaccttctcactttcctggtggggctccccctcaacctgctggccctggtggtcttcgtgggcaagctgcggtgccgcccggtggccgtggacgtgctcctgctcaacctgaccgcctcggacctgctcctgctgctgttcctgcctttccgcatggtggaggcagccaatggcatgcactggcccctgcccttcatcctctgcccactctctggattcatcttcttcaccaccatctatctcaccgccctcttcctggcagctgtgagcattgaacgcttcctgagtgtggcccacccactgtggtacaagacccggccgaggctggggcaggcaggtctggtgagtgtggcctgctggctgttggcctctgctcactgcagcgtggtctacgtcatagaattctcaggggacatctcccacagccagggcaccaatgggacctgctacctggagttctggaaggaccagctagccatcctcctgcccgtgcggctggagatggctgtggtcctctttgtggtcccgctgatcatcaccagctactgctacagccgcctggtgtggatcctcggcagagggggcagccaccgccggcagaggagggtggcggggctggtggcggccacgctgctcaacttccttgtctgctttgggccctacaacgtgtcccatgtcgtgggctatatctgcggtgaaagcccggtgtggaggatctacgtgacgcttctcagcaccctgaactcctgtgtcgacccctttgtctactacttctcctcctccgggttccaagccgactttcatgagctgctgaggaggttgtgtgggctctggggccagtggcagcaggagagcagcatggagctgaaggagcagaagggaggggaggagcagagagcggaccgaccagctgaaagaaagaccagtgaacactcacagggctgtggaactggtggccaggtggcctgtgctgaaaactaggtcctccgggggaggagggtgtagctggcgtgtcatcctcagggcgcttcctcgctcacgccaggagggacttggagtggcgagctggggcccgatggggcttgggggcagagtagacatctagcctccctaagggtatgcgcgctaaagcccagctctcgatctcacctccatccccatccacccacacactatggattgggctctgggaaggggtcagggtgagaggctgctctggagaacaatgaggtcctcatagcagcaggcagctcctgtgttttcttgagggtggcagaggagctaagagcagtgcccaggtctgagggggctgcccagtgagtggcaggggcaggagaggggagaaccccatcctcagagctgctcccagccagcgagtcaggagcgggggagacagggctccagggatgaggccgcattctgctcccacagtgccttttccagaaagttcccattgctcaataaatgtggatcatcagagacatttatgaacaatgacagaagaaaaattacccaaataaatgtggaagcaagcaaaagagaacagtgtttccttcttctcctgttttgttctggtggtgtgcttgggccgggtgggactggtggatggaaggagaaaacaccagactctggaggaaaagggccaaacaccaggatgcctggatgctgggagaggatctggcttgcagggatgaaaataacagctgccctgtctaaaggacttggcctgacacatcatctccttctatctctcaatagccctgtgagaggtaccagcattatccccagtttcagatgaaggagtggcccagagaggtgacatctcctacccgagatcccatagctggtgggcgattgaagtgggaccagaagctggtgtcagttgactctgacacccatgcccctaagccactctgctgttctccatctgtgtgtcacctgtggtcacctggcccagtcagatgaggctgtctgagcaggacaaatgcaaacaggctgtgataaggaacagaagtaaatgcaaagcacagtgagtatctgtgtgagtgcatcctctccccagtaaagaagacttcttgaaaagtatagattacgatacttggagtcaatgattgggcaggtgactcacagtgggcacccgatgctcctcgatcttagctaatgcaggatctcttcaactttttacatccttgtccccttcagaagcctctttggatatacatctttcctacacagcacattcctctgcctgcttatgcaatttcagtgcaaccaacacactgtcggtttatgtgttgtggccctttacaaagacagaaactggctgggcgcagtggctcatgcctataatcccagcactttgggatgccgaggcaagagaatcacttgaggtcaggagtttgagaccagcctggccaacatggtgaaactttgtctctactaaaagtacaaatattagccgcatatggcagcatgcacctgtaaacccagcttcttgggaggctgaggcaggacaatcacttgaggccaggaggcagaggttgcagtgagccgagattacaccactgcactccagcctgggtgacagagtgagactctgtctcaaaaaacagaaggaaggaaggaaggaaggaaggaaggaaggaaggaaggaaggaaggaaggaaggaaggaaggaaaagaaagaaggaaggaaagagagaaagaaagaaagagagaaagaaggaaagaaagagagagagagaaagaaagaaagaaggaaggaaagaaagaaagagagaaagaaagagagaaagaaggaaagagagagagagagaaagaaagaaggaaggaaagaaagaaagaaggaaagagagagaaagaaagaaagagagaaagaaggaaagaaagagagagaaagaaagaaagaaagaaaagaaggaaaagaaagccacaaaccattgtgagattttttgttgttgttgttccccaagaactagttttcacctatttgggatcaacattgctgctgctgagaatgtctgagctgcagaaatggtcccatctaatatactgatagagcctgtctcacagaactgtagcccaacaaaattaggctgaggaccttgctgcaggaatggagatcacactacggaagaagtgtgaggtctcgtacaagagaagagacccagttatcatcgaatttgagctaagagtagcgtgaatttagatgaagaggtgtgtgataggctcaacacaaagcagggatgtgtggaaagaggccagtgttagatggaggccaggaagattactcaaggtcctgtttctctggaaaataccaagcaaagataaaggtagaacttcgtattggaaaactccttatctgaagctctggtgggttgaaaatcaaggttgcatctctgtgtcagagactctgatcctctaagcagaagtatatgttcctttcttactcatgatctcatgcagctaagtttctgactatctttgacttttgagaacaaggtttcttagcaatatccttttgttaattagcaaaacaagtttttaaaggtttacaagagaaacttttttagaaggagagatcctccttcaccgaaaccaagggcaggtcaacccagaaggacaagaggaagggaagattcaacccatctcggctacagcttcctgaggccataggtcaagtctcagcttacaggggagtgagaggaaacaagaaattttaaatcacccagtgttggttgggtgcgatgactcacgcctgtaatctcagtgccttgagaggctgaagtgggaggactgcttgaagcaagactccgtaatctaagaaaaaaagttagtcgggcatagtggcatgtgcccatagtcccagctgctcatgaggctgaggcaggaagatcgcttgaacccaggaggtcgaggctacagtgagccgtgattgtaccactgcactccagcctgggtaacagagcaagaccctgaaaaaaaaaaaaaaaggaaagaagaaaggaagaaagaaagagagaaagaaagaaaaggaaagaaggaaagaaagaaagaaagaaagaaagaaagaaagaaagaaagaaagaaagaaagagaaagaaagaaagaggaaagaaaggaaaggaaaggaagaaaagaaaagaaaagaaatgagtaaatcaccaagagtgcgggaagatcgcttgagcccaggaggaggtcgaggctacagtgagccgtgattgtaccactgcactccagcctgggtaacagagcaagaccctgaaagaaaaaaaagaaaaaggaaagagaggaaagaaaaaagaaagaaaggaaggaaggaaggaagggaaagagagagaaagaaagagagaaagaaaggaaaagaaaagaaagaaatgtataaatcaccaagcgtgaccagaaacctttggaagccacctaagaaactgacaaagatggttcaatccatcccatggaaggcagtgagaccattgcaggcttgagcccagtacgctcagactactcagtaaaccagtggcagtggcagacaggagagagagcaggaattccccactgggagacaggatgccagtgcctttttatgagttaaacatgtatccactagagagtgcagtaagtggcctctcaggctgtgcatatgcctggtggggcatgggaagctgtgctgcaagacaggatccgtcagccggcttcaactgggttcagctgggagggggcagacatagacctggtcagggccggcggaggtggaagggaggtaggaggctggacttgactttggaggtggggctcagacactggaccaaattgaggactagctaaaacagggaaacaaggacggagcttaagcgacttcccataggacatgcccaccagtgtcccctgtcagtttaccatggtcatagcaacagctggtaattaccaccctttttctaaaactttgggcattaaccgccccttaatctgcatgtaatgaaaaatagatataaatatgaatgcaaaactgccctaagcggctactcttagcacattgctatggggtagccctgctctgcaggggcagtcacagagctgttgcactgccagaactataccaccatcactttaataaaaccactttcttctaccactggctagcctttaaattctttcctgggtgagctgggtgcagtggctcacacctgtaatcccagcactttgggaggctgaggcaggcagatcatttgtgatcaggagttcgagaccagcctgggcaacttggtgaaacccagtccctactaaaaaatacaaaatttagccaggcgtagtggcccgcacgtgtaatcccagctactcaggaggctgaggcaggataattgcttgaacccaggaggcggaggttgtagtgagctaaaattacaccactgcgctccagtctgggtgacagagtgacacaccatctcaaaaaaaaaataaaaatttaaaaattaaataaataaattctgggttctgggcaaagccaagaaccttcccaggctaaacccctatttagggctcatctgccctacatcagaagggaaacaaagaccagacaaggagagcaagaagcctgggagtctacaaaataagttgcgggactcttccaaaaaaatgaagctgagcatcgataaaagctcaaagacacctggaagaaaagtgagaccaccgtttctgggaattacaagtaggagacagaggtttttattgggggagaatagtgtgagaaggtgctcaacttttgaccttcctctctgaggacatgactcttctggtttagaaaacaacagtaaaaagtccccaagagatactggtggttgtggttcccaaaacttcattaacatctgtgggaagccttctgactttcctctgaggccagttctgaaaagccattcatatggaggcaaatcaaaatatcaaagcagcagcctgtgttctgggaaaatgttgctgggatcacattccagagaaaagatgggatagaaggaatgaaagctgatcaacatggctgggtgcggtggctcacacctgtaatcccagcactttgggaggctgaggcaggcagatcacctgaggtcagaagctcaagaccagcctggccagcatggtgaaaccccgtctctactaaaaatacaaaaattagccgggcatggtggcgtgtgcctgtaatcccagctactcaggaggctgaggcaggagaatcgcttgaacctggtaagcagaggttgtgaggttgcaaagttacagtgagctgagattgcagcactgctctccagcctgggcaacaagagagaaaactccatctcaaaaaaaaaaaaaaaaaaaaaagaagaagaagaagaagaaagctgatcaacactggtagaagtggggaagggcagagctcacctcccatgggagccagggtggagctagcagagagaaaatgttgtgaaagaggaaatgggatacggaaatattttttgaggagagggtgcttttaatggatttagaagaatatagtggctggatatggtggctcatgcccataatgccagcactttgggagtctgaggcaggtggatagcttgagcccaggagttccagaccagcctgggcaacatggctaaaccctgtctctactaaaaatacaaaaattagaggagtatgttggtgcatacctgtagtcccagctacttggggggctgaggtaggaggatcacctgaactttgggaggtcgaggctgcagtgagccatgatcaggccactgcactccagcctgagtgataaagtgagacactttctcaaagaaaattaaaattaaaattaaaattaaaagaagagtatagtgagataacccaatcaatcatcccctgttgcagatcccccagtctcaagggtcaaattgtgattggcactaatcatgatgctgttgaccgcctttactggtgactggtcctaagatggaagtgtgacccaattccagccaacaaagggaaataagtctgctgggggcctctgggaaagatttttctctatctcattaaaaaaatagatgtgtaaggagctgcgctcctacttctaatctggaactttctatggaaggatgtgatacttggagctacagcagccatattggggccatgaggttacaaacttgaggaagaaagcaaacaagctaaggacagcagagcagcaggatgtaaagggcctgcgtccttgaccctgttgaggtgggaccaccaacctccaaagtcactgtagtaaatgttccttttgttgactcactattggccagataccctctaacttgcagcttaacataatagatcagcttatatcctactagaacctacccattgacatcttctctcacgttaaaatattttaggttcctggagtttctaaactctgcctatttgccttataggagctatgtgatgttagcatttgccttatttgttacagctgaactcaggagatgtcttacagttctagacactagctctagcaccaagatgtctggactctcctcattcagaagaaggcttttgagagctgactggctggggctgcatgaacattgctttccaagacaaaaaaacacacgtgctagatgggacctttttaaggtaaaatgttcatctgactgacaatcttaattgcaagcctgcacttttattaataaaaattctcatacttgagcagatcacctgaggtcaggagatcgagaccagcctagccaacatggcaaaaacctgtctctactaaaaatacaaaaattagctgggtgtggtggcacaggcctgtaatcccagctacttgggaggctgaggcaggagaattgcttgaacccaagagatggaggttgcagtgagccaagatcatgccactgccttccagcctgggcaacagagtgagactatttcaaaaaaaaaaaaattctcatacttactaagggctcttggatgccatggaaacaagagagggctgaaagacctctctttcttgatgtggaccatgagcgatgttatcctgtggaaaagtacttgtctctgttcagtgttcttgggcacaggacagctacccagtccttgtgcctgtggagtcactcaaacacacacaatgcccacatgaagatggggatatgcggtcttggatgcctaatttactacttaaaattaacacacacaattagatgattcccttttccctcccctccccttttttttttttttttgtttctttttttttttttctgtgacagggtctggctctgtcacccaggctggagtgcagttacgcaatcatggctgactgcagcctcaacttctcaggctcaagcaatcctcccgcctcagcctcccaagtagctgagactataggtgcatgccaccatgcctggctaattaaaaaaaaaaaaaaactgtagagatggggtctcgctatgtggcccagactggtctggaactcctgggctcaagcgatcctcccaccttggcctcccaaagtgctggcatgacagggatgagccagtgcacctagccttgataatttccagtggttctctatgcttagagcattactctcatcttttttttaaacagtctagaatgctctcttaaagcctccataaaaataactccttgtttgtgtatcctttggtgaacaatccaatgacttgcaggagcacttccaggcatccccagccgttgcaggcctgcagacttcttccctggcccacacttgctggtctgtttgttcactctgcagtgaacccttctgcttacagcttttccagctaaccttttgactcacaatgtagcctctgacaaaaagcagaccagtagttaccaggggctggggatgggagagaggagggtgttgactgggaagataacagagggacattttcaggtgatggaaatgttagatcacttgattgcagtgagggtcacacaagaagtcaaaacttattgaactctctccgtccagtgggtgcatttcatggtgtgtcaatgaagcctcaataatgttgtttttaaaaaatggtgtcacctcacctcctggcttgtagtgtttgtgtacctaatatcaatcttgctaagtttcctccagccaagcaagtctctgcttttgctgggctgctctgcagaggctgtgactgctggatgataacccaggttacataaaagtgtagaaaccatgtgcaaacaaatgatacgtggcaaccagcttttatcttggtgctggagatctgcagggcgtggtggaaagggcggcaactggacagtgcaatggttcatttcacctcctgtcaccacatggggctgtgggggcagctctgtcataccttccaattttccaagctgaaaatccaattgtcattgctgtttttgaaatcttacatttttaaaaaactgataacaaattcaaaatgtttaagtatctatgtggggaaagtgaatcaggcctgagggttgtggactgctttctaggtttccagcctgtgacctctgcagcagtggaggcagaggagggctcagaggtcgggagggaaggggaaggagcatgaagaagtgtgattctgcacgtaagcacggcccatacttttactcagaacccaagacaggcagttgacaagaacgtcggaagatgttcttcctcatccctcgttcttattttgcagtccctccctgcccctacagctgttctctgaaagctgtcaccctcatccacaaaaagatcttggaggccacaggcaaggcagggagggaagctccgaggactgatgctggctctccttccttctcctcccaactccccctcccaactggcactgaaggcaggtgttcctcaggctcggaccctgcctgcctttgttcgttttctctctcctgtctgcaggcattctgatccatcacaatggctgttaacattcatgactcccacatctccagcaccagacccttgtgtatccaactgtatagagagacatctcaacttctagactttcaagaccaaacctaactccttacttcgtcttcctaatctggccccaccacccagcctactccacctctataaatggcaataccacccacggtctgcccacatcagaaacccagatgtcattcattaattcattcattcattccttttttttttttaaacagagtcactctgtcacccaggctggagggcagtggcacaatctcagctcactgcaacctccacctcctgtgttcaagcgattttcctgcctcagcctcctgagtagctgtgattacaggcatgcaccactatgcctggctaacttttgtatttttactagagatggggcttcgccatgttgtccaggctggtcttgaactcctgggctaaagcaatctgccagcctcagcctcccaaattgctgggattacaggcatgagccaccatgcccagcccattctttctttttttagagatttgattctttttttaatttttaaaatgatcatacaataaaatgaatgttttcaggaaaaggtgtacagttctgtgaatcaaacagacagagagattcccgtaaccaccaacaaaatcaagataaagagcaacgatagtcacatcttcccttcacccctagccactacgaaacacagatctgctatcattagggttttatcttctcaagaatgtcacatagcttttcgcaacaggtttgcaacagaacacaggtgtcatggaaactacccctaaaagccaaaatgggaaaggagaagactcatatcaacattgtcgtcaatggacacatagattcgggcaagtccacctctactggccatctgatctacaaatgtggtggcatcaacaaaagaagcattaagaaatttgagaagaaggctgctgagatgggaaagggctccttcaagtaagcctgggtcttggataaactgaaagctgagcgtgaatgtggtatcaccattgatacctccttgtggaaatttgagaccagcaagtactgaatgactatcattaatgcccctaaggaatgagaccaccacttctcctgttgtccttcccagcttctacccaaccttcccttttccctagtttataagacaggagaaaagggagaaagcaaaaagttggaaagaaacaaaagtaagataaatagctagacgactttggtgccaccacctggccctggtggttaaaataataataataatattaacccctgaccaaaactactggtgttatctgtaaattccagacattgtatgagaaagcactgtaaaactttttgttctgttagctgatgtatgtagcccccagtcacgttcctcatgcttacttgatctattatgaccctttcacatggaccccttagagttgtaagcccttaaaagggctaggaatttcttttttggggagtttggctcttaagacgcgagtctgccgacgctcccggccgaataaaaacttcttccttctttaatccggtgtctgaggagttttgtctgtgactcgtcctggtatatcccaggacacagagacttcatcacaaacatctttacagggacatctcaggctgactgtgctgtcctggttgttgctgctggtgttggtgaatttgaagctggtatctccaagaactggcagacctgagagcatgcccttctggcttacacattgggtgtgaaataactaatcactggtgttaacaaaatggattttattgagccaccctacaaccagaagagatatgaggaaatcattaaggaagtcagcactatattaagaaaattggctacaaccctgacacagtagcatttgtgccaatttctggttggaatagtgacaacatgctggagccaagtgctaacatgccttggttcaagggatggaaagtcacccgtaaggatggcaatgccagtggaaccatactgcttgaggctctggactgcatcctaccaccaactcgtccaactgacaagccctgcttctccaggatgtctacaaaattggtggtattggtactgttcctgatggccaagtggagactgttgctctcaaacctggtgtggtgatcacctttgctccagtcaacactacaactgaagtaaaatctgtcaaaatgcaccatgaagctttgagtgaagctttttctggggacaatgtgggcttccatgtcaagaatgtgtctgtcaaggatattcattgtagtaacaatgctggtaactgcaaaaatgacccaccaatggaagcagctggattcactgctcaggtgatctatcctgaaccatccaggccaagtcagtgctggctatgcccctgtactagattgccacatggctcacattgcatgcaagtttgctgagctgaaggaaaagattgatcgctcttctggtaaaaagctggaagacggccctaaattcttgaaatctggtgatgttgccatcattgatatggttcctggtaagcccatgtgtgttgagagcttctcagactatccacctctgggttgctttgctgcttgtgatatgagacagacagttgcactgggtgtcatcaaagcagcggacaagaaggcagctggagctggcaaggtcaccaagtatccccagaaagctcagaaggctaaatgaatattatccctaatacctgccaccctggtattaagcagtggtggaagaatggtcttagaactgtttgtttcagttggctatttaagtttagtagtaaaagactggttaatgataacaatgcatagtaaaactttcagaaggaaaggagaatgttttgtggaccactttggttttctcttttgcatgtggcagttttaatttattagtgtttaaaatcagtgctttttaatggaagcaacttgaccaaaaatttgtcacagaattttgagacccattaaaaaagtttaatgagaaaaaaaaaaaaagaaagtcacataaacagaatcctacagtgtgtaaccttttgagctggcttctttttatttattttatttatttatttatttttttgagacagaatctcactgcaatgcccaggctggagtgcaatggtgcaatctcagctcactgcaacctctgcctcccaggttcaagcaattcttctgcctcagcctcccgagtaactggaattataggcatgcgccatcatgcctggctaatttttgtatttttagtagagacagggtttcac[131 bp omitted]ctgagcttcatccatgtcaccatgcctggctaatttttaaattttttgtagagacaggatgtcactatgttgcagaggctgatctcaaactcttaggctcaactgatcctcccatctcagcctccaaaagtactgtaattacaagcatgagccaccacactcgacctcctatttacttcaccttggaagctacagtgttacccagagcctataaacaaacaaacaaaaacaccatggatattttgttcctggtacacaaattaatgtctttaaatccaccaacaccactatacattctatgcaattaaaaaattaacttgaggccgggtgtagtggctcacacttgtaatcccagcactttgggaggctgaggagggcagatcacttgaggccaggagtttgagaccagcctggccaacatggcaaaaccccatctctactaaaaatataaaaattagctgggcatggtggtgtgcacctataatcccagctactctggaggctgaggcaggagaatcacttgaacccaggaggcagaggtagcagtgagccaagatcatgccactgcactccagcctgggtgacagagtgaaactgtgtctctaaaaaacaaaaagaaaaagaaattcacctaaggcacatgaccagtaagtcccttagtgctagtaccgtctatgcaaaatagcaaatacagagtgaaacaaaccaatgcaagcatttatgtgaaattgggctgcatgcgaaatctggcttcatgcttaactacattaaaaacaattgccaaactgtcaatgtatttcttcacaatatttcttattttaacttcatcacaactaagagctttaactatgaacaatgttaactagtcaaatttctgtaattttccaccatgttttaaataatattttatttttattttattttatttttttgagacagagtcttgctctatcatccaggctggagtgcagcagcatgatcttggctcactgcaacctctgcctcccaggttcaagcgattctcctgcctcagcctccctcaagtagctgggactacaggtgcccaccatcacgccctgctaatttttgtatttttagtagagatgggtttttaccatgttggccaggctggccttgaactcctgacctcaggtgatccccttgcctcagcctcccaaattgctgggattacaggcctgagccactgcgtccagtcaaaaatatcttattaactaaactttttcaacttcctgttttttctgtatgttcatgaacacagacacttagagaaacagaaaaaaataaaaaactgtgtatgacttacatagaccatctatgacatgcttggacttcctgttgtgtcctaattttatttatttatttatttatttatttatttatttatttatttattttttgagacagagtcttgctctgttgcccaggctggaatgcagtggcatgatcttggctcactgcaatctctgcctcccggattcaagcaattctcctgcctcagcctcccaaagagctgacattgcaggtgtgtgccacttcgcccagctaatttttgtatttttagtagagacggggtttcaccatgttggccaggctggtctcgaactcctgacctcaggtgatctgcctgccttagcctcccaaagtgctggaattacaggcatgagccactgggccccacctgtcctaaattttttatattttaaataacccctcattttactttaggacagaaatttacaatgcaagatcctttctcctacaaaagtattttctttataaccttccttaccaaaaacacatctttatatccataactgtcttcacatctctctcccctttgctttctaccttgtttcataaataactttcccaagcccataatgtgaatcaacctctagataacttctgaattagacaaaatttttcttattctcaataagaacgcatcttctttggcacattttacatacagaattatatgttaactagaattcttattcttagtaatcttaaattttagtgaaaacctaggaagcaagaaatcctgaactgccaaacagatgttagcattggcaagacaattctacaatttttaaaaacatgtttgcctacatcataaccctttctgaattggaaatgtcccagacatccaataaacacccaatataatttcaagattttaaattacatgaaaaatttccctactgcatttatcccatttacatttcattcatttttagcaatttatcctactaatgaaaattgggatattaaacaaagctagtcattatttcttcattaaccatttttataacctgtgaatatcaggtgttcacctaagtaagaaatttcgagttaaacacatgggtattttcacccgtaactcagaagattcctctgccttttttaaactaacaacattaaattagtcttacctatcaaaaaatcacacaaagatcattttgttcttggctagatttacaatcttataatcttttgtgccaaactctgacaccttaaaatatctagcagagacaaagataaaacccagacaaaaatgtatgctgacaattcagaagacatttctatttttattttaccgattatcttaaagccagcttatttattaaacatttacctaagtcacgtaaacttgaaaaatgcttggacccatacacttaatttatgagtgctcctttatttactggccaattttggtaccctgcaaaaacaacatataacatccaggaacatatgtacttgaaaagatccaatagcttttcctagggattcttgctgtgagatagcaatacaaattcaccagtttataaacatactcacacaggtaaactttgttttccctgataggtaattcaatgaaggctatgaaccaaaattttgagtaaagcactttctatgatagttttatttttattttatttttattttttgagacagggtcttgctctgctgcccaggctggagtgcagtagtgcaatcacagccacagcccactgcagccctgacctcccaagctcaagctatcctcccacctcagcctcctgtatatctgggactacaagcgcatgccaccttgcccagctaatattttaattttttttgtacagaaaggatcttcctatgtcgtctagcctggctgcaaactcctaagctcaagttatcctcctgctttggcctctcaaaacgctgagattataggcatgaaccactgtgcatgacctatagttttatttttatttatttatttattgagatggagtctcactttgttgcccaggctgaagtgcagtggcatgatctcggctcactgaaacctccacctcccagattcaaacaattctcatgcgttagcctcccaagtagctgggattacaggcgcctgccaccacatccagctaatttttgtatttgtaatagagacagggtttcaccatgttggccaggctggtctcaaattcctgacctcaagtgatctgcccacctcagcctcccagagtgctgggattacaggcatgagccaccacgcccagcctatagtttgatttttaaaggcccaacctccccagactccaaagaacactgaggccaaacagtaccacagaagaacatcatgtactaataaggccttgaaaccacctttgcaaagatgatgacagtgagagaagtctagcatgactgactccgtcttgcttctagccttacaggctggctgtcctcattattcctgggcataagccaagctaaccattggaggaatttatagtttaactttgaagcaaggatgataacaatctttccctaaaactataccctccttgctcagtgactgaagccacatttataaaactaatgaaaggccacaacattaggattatgggaggggcctggattctgttaaaatgtaggcatagtttcaataatctcttactgctcaggagtttgtggccagagatcacaagattcgtgacttccccgattgctcctatagacaacattgctattgtagaacgtgatcggtcttttgagatgtttttcagactttggcactctggcaaccaactgaccccacctgaacccatgactcatgactcaactggtcctgtggatcccacccagaggcagactcagtgcacaagaacaattttctacacccttacagttttatccccagctaatcagcagcacccatctcctagacctctgccaccaaataatccataaaaaccctagcttctgaatcctcagggagactgatttgagtgataactccagtctttctgtttggctagctctgtgttaattaaattctttctctactgcagtatcatggtctcagtgaattgtttttttctgtgcagtgggcaagaaaaatccttcaggcaattatagcccaacctggctttgaacagcaacataaaaacctggatacatggaactccatcccactttcccattcaacagcaaaatgagacccatggaggggccagagcgttgcaaaagaatatccattgatcaaattctcgtttctcacaactatattgacacacacacacataaacaaacaattatcaaaagcaattcaactgctacagcaacaaacaagccccaagtgtgtccatactaaaacagctggggtgccttcctctctcagttggtttttaaaggccaaaccaaacctttggtgggcagaagcctagggagtgggttctgctaattggttgggggtaaaactgtaggggtgtggaaaatggtcctcgtgcactgagtctgcctctgggtgggaaccacagaaccagttgagtcatgagtcatgggttcgggtggggtcagtgcgttatcagagtgcaaaagttgatcttgttccatctgcaaacagaaatatcttctgagtttcccaaatcaagagaagccctctggtacccaccagaaatcactcacatgtccagacgcagttgtgcacacacacaattactaatgtcaacaaaaagagtcaaactctgtaaaatatttgaagagatttattctgagccaaatatgagtgaccatggcccatgacacagtccccaggaggtcctgagaacatgtgcccaaggtcgttggggtgcagcttggttttatacattttaaggaggcatgagacatcaatcaaatacatttaagatatacatttgtttggcccagaaaggcgatacaactcaaagcagggtggggcttccaggctataggtaaatttaaacatcttctggttgacaattggttgagtttgtctaaagacctgggatcatagaaaggaaatgttcaggttaaaagattgtggagaccaaggttcttttgaagtcttacagtggctgcccttagaaacaatagttgacaaatgtttcctattcagacctttaaaaggtgctagactcttagttaatctcttcaggattgggagggcctgaaagaaaaagatctagctatgttaatagagattctttacagatgcacatttcccccccacaaaggacaactttgcagggccatttcaaaatatggcaaagaaacatgttttggggtaaaatattatgactttcttctttgtcgtgtaatgttataccagagtaagattggaaagtaagtcacaatatgtaagttaaataaaacccatctgggctgggcatggtggctcacgcttgtaatccctgcacttttggaggctgaggcaggcagatcacctgaggtcaggagttcgagaacagcctggccattatggtgaaaccccatctctacgaaaaatacaaaaattggcagggcgtagtggcaggcacctgtaattccagctactcgtgaggctgaggcaggagaattgcttgaacccaggaggcagaggttgcagtgagctgagatcgcaccattgcactccagcctgggcaacagagtaagactgtctcaacaacaacaacaaaaatctgatgagaatttatggtttgtagagcatgacttctctagaccccttagataggaatttgggcaagattttaaaaatcagagcttagttctcactaacaagccccaagagtgtccaaactgaaacagtcatggtgctttcctccctccatcatttgggcttattcaacctgcaaatggaaattccttagaaaattcccaaattgagaggagcccttcctgctgtctggaacccagaaaagacactcatccatccagacacagatatcaaatttcaaagtctgttcttcctaggcaatcagcaatacatttggggctggcagcagcagagccaaagagaaaaagatggaaacccacctccagccaaaaaaaggtcagacagctgtacagggggcttctgaaagtcccagtctgcagcagctgagccacaagcaatgtgttcccaggtagggaaccaaaatctgttactgaaatgccagggctccagtctaggtcccgttgctcactgcacagaaagccaatcaccaagacaatgagtactgcctgggaagaaggctttaattgagtgctttagccaaggaaaatggggatcagtctcaaatccatctccctagtcaactaaaatcagggggttatacagcagggaagaaatgtaactacatgtgggaaaaccagagttagggagaggtaaggaagaggagttggtcaaaggaattagggagggataaggaaatcaggagggatgaggggtctggcatctcattgtctggatgcagtgatctggtgagtttcaattcgttgatttcctgtggcaagaactcagataagacaaatgcaggcttcaaactttaagaccaggagggggccaggcacagtggctcatgcctgtaatcccagcactttgggagcccgaggtgggtggatcacgaggtcaggagatcaaggccatcctggctaacacagtgaaaccctgtctctactaaaaatacaaaaaattagccgggtttggtggcatgtgcctgtagtcccagctactcaggagactgaggcaggagaattgcttgaacctgggaagcagaggttgtagtgagccaagatcgcaccactgcactccagcctgggcaacagagaaagactccatctaaaaaaaaaaaaaaaaaaaaaaaaagaagggtgaatttctacgttgatccaaaagaagcatctatgggacaatcaggccagtttcatgaggaatataaattggatcctgtcattgccctgaataaaacttttcaatggctttccattctggcctcctcctcacagcctttgaggccctgcctctctctccaagcttctctggggccatccccagagaagtgtcactgacatcgctcttctggcctggacttctctctgtcccttgagcaggccaagctctgaatgtctgcatgcaccatgccttccactctttacctggctagttccccacttcttccaagtttctgtccaatgtcacgccttagagaggctttccctgatcatccaatatcaagtagcccccttctgatattatctcacactgcgctctcatggtttgatgtttgtatgtgtgtgttcatttgtttaacgtgactcctactagactgagaagcccatgacagcagtcaccacgtcagttttctttgtcactatatacccagtgggtgcctaaaaccgtgcctagcacagactgggcatttgatggtgaataaatgaatgaatgattttttaaaaatatctctaattttctactattataaataatgctatgagaacatccttttacataaaggcacgtgcactgtgcatttcctacaagtcgtactgttgaattaaatgatatgtacatgtaaagctttgataaatatcgatgaattaccttccccggctgagtcaaccctttcttccccaacagtctgtaagagaccccataactctgctgacaagagaaaatattgtattttaattttttgagatgatatttagaatttagaaacttaagtattagtctgggatttccagagaaacagaaccaatagagtgtgtgtatgtgtgtctgtgggtgtgtctgtgtgtctgtgtctctgtgcatgtgtctgtgtgtgtatgtgtgtctctgcggtgtgtgtgtgtctgtgtgtgtgtctgtgtatgtatctgtgtgtgtgtctctgtgcatgtctgtgtgtgtctctgtgtgtgtgtacctctgtgtgtctctgtatgtttttgtatgtgtgtctctgtctgtgtctctatgtgtgtctctgtgtgcatgtctgtgtgtgtgtttctctctgtgtgtgtttttgtgtgtgtctgtatatgtgtctccatgtgtgtgtctgtatgtctctgtgtgcgtctgtgtgcatgtatgtttgtggctctgtgtgttaatgtgtgtctctgtgtatgtgtttctgtgtgcatgtttgtatgtgtttctgtgtgtctctgtgtgtttttgtgggtctgtgtgtctctctgtgtgtgtgtatatctctctgtgtctgtgtgtgtctctgtgtttctgtgtgcatgtctgtgtgtgtgtccatgtgtgtgtctgtgtgttactgtgtgtctccgtgtgtgtgtctgtgtgtttctgtgtgtgtgtttgtgtgtgtgtgtgtgtgtgtctgcatgtctgcatgtgtgtataaagagatttatttaaggaattggctcatgtgattgtgaatgcttgatgagcccaaaatctgacggaggaagctggctgactcgaggctcaggaagaagttgtggttgagtctaaagagagcctgctggtgagccaggaagacccactgctgcagacaaagtctgaatccagcatgcaggagaattctcttttgcatgtggaggtcagccttttgtgctgttcaggccttcagtgactggaggagtcccccacattttggagggcaatctgctttgctcagagtccaccaatgtaaatgtcaatctcatccaaaaacaccctcacagcaacacccagaataacgtttcaccaaatatctgggcactgtggcgtggccaagccaacacataaaattaaccgtcatactctgtattattttcatattaatctcccagattaaaaatgagatagacaatatttacatattgtgtagagtcatttgtgtttctcccaatacttgctttgttcttatttgacttacaggagttctttgaatattggcttacaaacctcatatcaggtgtataagtagaaggatagtggccttttactttgttgattgtaatgtttttcataggttatctctttttatgtgctcaaatttctcatcattttttgatgacttctacattatgtcatactgggaaaaagcctccttatttataagacttttaaaattacacaatacctacacaacatttattatttttaaaaacatttttgatcttgaatgcacctgccttttattcttgttacctggctgtaattcttcccagtggataggcagctatcccaacataatttactgaatagtccatcctttcctacagtggtttgaaatgaacctggatcacttaagtaggaagaatcctctaaatgtaatctaaaacaacaagatttcatcatttttacccatccttacccataatgaggaaaaacattaaagattcaaacatccagtgttggagaaggtgcaggggaagggattctgccatgtacagctggtggaaatgtaaattaccaaacactatcaggaaggtaatatgcaaatatctatcaacaatttcaaggcatacctctttgaactagcaattacataaattatagatctaaagattcatctaaccaaaatactcacacctgttcagatagctagctagctagctagatagaaagatgatagatagatagatagataggtaatagataaatttgcagaggcactgtttgttataccaagagaactgtaaactatgtaaattaatcctaaatggttacataaattataagacagtcctaaaatgaaataccatgtagccattagaaagactctagattggtataggctgccatgaaaagatcactaaagcatattgtaaggtgaaaaataaaatttcaaaaaaaatatggagtatgattccatttatgctttttcttttctttttttgagatggagtcttgctctgtcacccaggctggagtgcagtggtgccatctcggcccactgcaacctccgcctcctgggttcaagtgattctcctgcctcagcctcacgagtagctgggactacagacgcctgccaccatgcctggcttatttttgtatttttagtagagacagggtttcaccatcttggccaggctggtctcgaactcctgacctcaggtgatccgcctgcctcagcctcccagagtgctgggattacaggcgcgagtcaccgggcccagccccagttatgctttttttttttttgaaacggagtctcactctgtcgcccaggcgggagtgcaatggcgcgatctcggcttactacaacctctgcctcctgggttcaagcaattctcctgcctcagactcccgagtagctgggattatgggtgcacaccaccacactggctaattttttgtatttttagtagagacggggtttcactatattgcccaggctggtctcgaactcctgggctcaagtgatctgcctgccttggcctcccaaagtgctaggattacaagtgtgaggcactacacccggccccgtgtatgcatttttaaaccaaatatttgtatacgcacatatatggacataaacaaaatagaggtttcctctgggaatggagaagtgtcagggagaagtgaaacggcatttcacattttacttttgtaccgttgggtttttttaaaggctatattcacacattataatgcaactttttaaaattagagaaataataatgggaaaccattcagcaccttgattctgaccaagtgagagcagataaggcagcacagggattcaagctgcctggagacctccagggtcactgtgagggtggctggaatcatgggaataaataaatgatttaacatgctcaggcttctaagtgcccatccccggggctgcggaggagcgaggtgcttaaaccgttcccaagcctcaggcattgaaagcaggagtgttttctctaagaaggagggtgctgtgctgtaattgacctctttggcattcagcgtctgcacgacatccagtgcagctctgggccggcggaagagaccaggctgcttgtgctgggaggggccgctgcccaaggacaagtcctgtactcacagcaacgctgaatcgcagtcctgggccatctggccccggcctcataatcactcttctgtcatgaatactgaatgaaggtaaacatacagtcacagggctgtcttggcagcacccaactttaaacctgtggcctatttctagctctccactgtgctgaattctgtcaaaaacaaacaaataacatgctaaaactattttgtgaacattacttatttcacattaagaatgttgctctgttattgtttttttttttttttgagatggagtcccgctctgtcgcccaggctgaagtgcagtggcgcgatcactgcaacctctgcctcccgggttgaagcaattctcctgcatcagcctcccgagtagctaagattacaggtgtgagccaccacgcccggctaattgttgtatttttggtagagacagggttttgccatcttggctaggctggtctcgaactgctgacctcaggtgacccgcccacctcggcctcccagagtgctgggattataggcgtgaaccactgcaaccagccaacagcatggttttggtcacctcaaatgaggacacgaatatataaatctcacggttttggtattgcatcatatttttcatacactgggaaacaaaaaatggaagaggtgtaggctgtcctgacctctgaaaggccctgaggggacagtggccatcttttggtttcctggcttctgaaccccttctgtgtttagggaactggccaagtatgagccttgtgaggaggcagagcccatctcccactagagaagctactgatgcagggaccttgttttccaagcatccctgatgcctgcgtttagccaatcaggtgcacctgccccaaattctgaatctgaggctaatggcacaaaggaggaaaagcagaaaattatttctggcagtggcagtagtggtggcagacagaatgtggctctaggtcctagtgtgcggtggcggggggactcccacgtccttcctggactgagttaatggcatgacttttaatgtggccctggctgtgcagcttccttgattctagaagcctggttttccagccttcctggcacatctctgagctacccaatatcttatcattaaatccctaaatgagccagagttggtctctgttgctgcaattaacagcgattgctgagacacgagtccagcacaatgatgatgagcaaggaagcctgcgttctgttgagagatgtgcaaaccattagtaatcagaaaaatgagactacactaaaacggcatggagacgctacttgatatccatgtgactggcaaaatctcaggtgctggataatgccaagagtgggcaggggtgtggctcagagatccagttgccttgcagctggtggctatacccttttcccttttaaaaaatttgttttctcggctgggcgtggtggctcgcgcttgtaatcccagcactttggtagaccgcggcaggtggatcacttgaggtcaggagttcgagaccagcctggccaacatagtgaaaccctgtctcttctaaaaatacaaaaattagccaggcatggtggcagccacctgtaggctcagctactcgggaggctgaggcaggaaaatcgcttaaacccaggaggtggaggttgcaatgagccgagattgcaccactgcactccagcctggtgagagtgactctatcaaagaaaaaaaaaaggtttgcttttttacatttttttctctttttttaatttttaatttttattttttgagacagtcagtagcctgggctggagtgcagttgtgcaattgtagctcactgcagcctctacctccgggctcaagtgatcctcctgcctcctcctcccaagtaactgggactacaggcacatgccatcacgcccagctttttaatttttattttgtagagacagggttcttgctgtgttgcccaggctggtctcaaactcatgggctcaaatcattctcccacttcagcttcccaaagtgccaggattataggtgtgagccacagcacctggtccctttttcttttttatgtctatttgggtcccatacactcaacagctcaacagaagaaagggctgtggctggacagagtgggccatgccgcttgcctcttacaggaactatcgccttaatcactttcttcttgcttttaatttattttttgagtaacattaaacattcacacacatactcacatacttagaaaatttcttcaacagcagaaaaggatatacggggaaaggtgagtttccctcccgcgccaacgcccagagccccttcccagagacagccgcggagaataggttcatgggtgacccttccccaagtcttttcctcactcagcatccagatgggtccttcggaaatgtgacacagattacggcacaacctctgccctccaggggcttcccatcattctccggatatcattctacatcctactgtggcgacaaagccctacgtgagctggacccagtcgcctgcccctgcctcattcccacggctctcccccaccctgtccccttgcagcctctctggcctccccggcctcctctgacaccccatggctcatctcatgacttgctgtacctctgcctagaatgtccctagagcctccgactctcctgctggagttctctccttaaataccacctcctccgagggccttcctgggctgcctgcgccgccttccttcctctgttctcccaatctgaggcttcctacccgactccagcccacagccccaggctttgtggtaatgtaactgttgtaaacttaaaattctggccgggcgtggtggctcatgcctgtaatcccagcactttgggagttcgaggcgggcagatcacttgaggccaggagttcaagaccagcctggccaacatggccaaaccccgtctctactaaaaatacaaaaattagctgggcgtggtggagtgcgcctgtagtcccagttactctggaggctgacgtgggaggatggcttgaactcgggaggcagagggtgcagtgagctgagatcacaccactgcactccagcctgggtgacatagcaagactctgtctcccaaaaaaaaaaaaaaaatcctaagcccccccagtgactgaacagactccctcttggccaaggggaccccagaaaaaccttaaaacttgagttcctggccatgataggatgggaggtcagacatgcctcattatacgtctttaccttttacagttcagacactgaccagcattcatgttaaaatagagatcataagactgacagaacggaccctttatggaagtaagataccaaattataaatagaactaaggtcatgccaggcaagtggtaagtcacgcacctctacacttaaagaataacttatgctctaactgccacgaggcttttctttttctctagcagataaacaagcactggcctcaggataagcagtgttgaaacatttggaagctcctgcagatgctgaataactgacctccagcctctgttccaccagccacaactacagctttgattggagaagagactgatttcagccactttctcctggtaagaagaacagggactggtcctggctggtttacagaggttgctcacaggttgccttcctgtcttgaaaataccttttgatatttagggcctaattgtaataacatttaaatgctaagtctccactccaaggtgaacataggttggttttttgtttatttgtttgtttgttttttgagacagagtctcattttgtcgcccaggctggagtgcagtggcgttatctctgctcattgcgtcctctgcctcccaagttcaagtgattctcatgcctcagcctcccaagcagctgggactacaggcgcgcccctccgcctggctaaattttagtagagacgggtttagccatgttggccaggctggtcctaaactcctggcctcaagtgatttgcccgccttggcttcccaaagtgctgggattacaggcgtgagctactacacctggccaacataggttgtatgttacatgcatatttgttcaatatgcatgtgtcatgactacctcatgaatattcatagcttctcctgtaatctgttgaatatgtatgtttagccaacccattcagtataaaactcctaccccaaaccctcttccttcgaagtacctgtctctggtcttggccgaaggcacacttcccagcctgtgggacagccaccttgcaggctgtaaccctttataagaaataaagttttcgtcaggcatggtgctgtgtacctgtagtctcagctactcaggaggctgaggtgggaggaccacctgagcctaggaggttgtggctgcagtgagctatgattatgccactgtactccagcctgggcaacacagtgagatcctgtgaaacaaaggaaagaaaaaagaaggaaggagggaaggaaggaaggaagagaaagagagagagaaaagaaaagaaagagagagacagaaagaagaaggaaaagaaagagagaaaggaaggaaggaagaaagaaagagagagagaaagaaaaagaaagaaagagaaagaaagggagagaaaggaaagaaggaagggaaggagggagggaggaagggagggagggacgggaaagaaaagagaggaaggaaggaagaaaggaaggaagaaggggagggagagagaaagaaagaaggggagaacagaagagaaagaaagaaagagaaaaagaaaatcagagtctcctccccttttctacatgtataaattctgtgagttttaagtaatcactattcatcaatctctggcccatcttgctgcaatggtcagctccatggagccaggccttgtctaccgctgaatccccagcaccggcgagtgctgtgatgggggctactcaggaagtcctcgctgaatgggtgtggagacgcatggccatcctcatgccttgcttttttccgctgaacagtacatgtcagggcctgatctacattggcatacgtggacctgcctcgttctttgtaacaggtgtgtgggattcctaccatgtggatgctccatgatctttatttaaccagagcctttactgatagacaggttgctcccaattttttattatcacaaaacaaacaacaaacaaaaaaaaaccagaaaagtatatccatacagtaaatctgtagatatcagcttcttggatcaaataatatggaatgtttcattttggtttttttgttttcttttgttttgttttgtttccttttttttctctatttttttgacacggagtctctctctgtcactcaggctggaatgcagtggtggaatctcagctcacttcaacttcctcctcccaggttccagcgattctcctgcctcagcctcctgagtagctgggatttcaggtttgccccaccacgtctggctaatttttgtatttttagtagagatgaggttttgccatgttggccagactggtcttgaactcctgacctcgagtgatctgcccacctcagcctccctaagttctggaattacaggcgtgagccaccatccccggccggggtgtttcattttgaaagatgtcatcaaatcgcagtccccagagaaatccccagagaatcgcagtccccagagtcacagggagatgggagaaaagagaagcagatgaggccagagagtgctgcagacagaaggcccgtggagcagaacttgcaagttctgggaggactctagctttgatcagagaggtggggagcctctgtggggttctgagtagggaagagacgtagcctacttatgtttttatttatttatctattttgagacagggtctcactctgtcacccaggcaggagtacagtggtgtaatcacgactcactgcagcctcaatctcctgggctcaagtgatcctcccaccttagcctcttcagtagctgggactacaggcatgtgccaccacacctggttaatttttttattttttgttgagacagggtttcactatgttgcccaggctggtcttgaactcctgggctcaagtgatcctcccgccttggcctcccaaagttttgggattacaggtgtgagccactgcacccagccctgcttatgtttttataagaccattctggctgctgcgtggtgtgaagtagggaaccagagagcagatgctgcagagacacagctgagaaagtgctgagagcctggaccagggctgtgctaaaaagtggctggattggggagctattctgaagacagggtggaaaggatttgctgatggggtaaagagaagaatcagagatttctcagggcctgagcaactggaaggatggggtggcagagtctgtgtaattggggccctattcccaagatgttggcaccatgggcctgtaggggcagcagctggtggaggggaggcatctgggaaacttccctttcccaccagatagggtttcctgatgttagcctgtcagggtggtttcaaaacaggtacagctgggctgcagcaggttgaactgtaaggaagggccagcctacaggcaaatgagggcagtggctaactcaaatcctgtcccccggctaggcccacactcttcctttccctccatttcccctgttggtgcatgctggtgaccaggtgcccaggtgcccatacagctggagacatctgcattcccttgctttttttttttttcctttttcttttttctttttgagactgagtcgctcactctgtcgcccaggctggagtgcagtggtgcaatctcagctcactgcaacctccgcctcctgggttcgagcaattcttctgcctcagcctgctgggtagatgggattacaggtgccagccatcacacctggctaatctttatatttttagcagacatggggtttcagcgtgttggcaaggctggtctggaactcctgacctcaagtgacctgccgcctcagcctcccaaagtgctgggattacagcactttggcatgagccactgggcccagctttttttttttttttttaaagaaatggagtctggctctgtcgcccaggctggagtgcaatggcgtgattgcagctcactacagcctggaactcctgggcttaagcagtcctcccacttcagcttcctgagtagttgcaaatacaagcatgcaccagcacactcagctaattttttaatttttttagcgatgggctaccgctatgttgcccaggctggtctcaaacaactgaattcaagcaatccttctgctttagcctcccaaagtgctgggatttccagcatgagccaccacatctggccccctttcatcttaaaatgcttcccattctgttttgggtgccccatatctgacctttaccctatctgtcattgcgggatgctgacaaggacagtgtggctcaatgtgggtttctgttgtcaagataccacaagggcatggaaccagaagggggctgtcagtttctgactggctgcagcagcttatcagaacgtatcacagatcaggagaggacgatatgatcaacggatgaggtaaccatcagctgagggcaaacagctcctaactaaagtcagcactttacagctggctccagtgcactctccctgtggctgcaggcagagcagccagggcccctcctccagcctcctcccacctcagagcttcagagcttcagacatccttggtgctgaggcctaggttccatgaggtcaaagggagaattcaggccgggcacagtggctcacgcctgtaattccaacactttgggaggccaaggtgggttgatcacctgagctcaggagttcgagaccagcctgaccaatatggtgaaacctcatctctactaaaaatacaaaaattagccaggtgtggtggtgagtgcctgtaatcccagctactcaggaggctgagtcaggagaatggcgtgaacccaggagaatggaggttgcagtgagccgagatcgcctctgcactccagcctgggcaacagagtgagactctgtctcaaaaaaaaaaaaaaaaggagaattcagactaagctgttttgcagcatcccaaggctgtgttgacctcacgtacagctgcatcatgggagtgggcggtgcgacatctcaagtccaactcaaccgagccatggttcaggctaagttcccgctggtgcccctacctggaacgctcttcagatagtggctccttctcacccattcaaatgtcccaggcctttcctgacaggccctgcccatctctctctctctctctctcaatttccctgcttgctttttgttgttgttgttgttgttgtttgatttttggtccttttttttttttttttttgaggcagagtcttcctctgtcgcccaggctggagtgcagtggcatgatctcggctgactgcaatctctgcctcccaggttaaggtgattctcctgccccagtctcctgagtagctgggattaccagtgcccgccaccatacctggctaatttttgtatttttagtagagacagagtttcaccatgttggccaggctggtctcaaactcctgacctcaagtgatgtgcccgcctcagcttcccaaagtgctggggttacaggcatgaaccccaccacgcctagccgatttattttctttcccttttttttcccccagacaggaccactggattggagtggtgccatcatagttcattttaatttccaactcctaggctcaagtgatcctcccgcctcagcctcctgagtatctaggactacaggtgtgcaccaccatgcctggctaattttttatttttatccttttttgtagagacaggggatctcactatgttgcccaggctggtctcaaacacccagccttaagcaatcctcctcctgcctcagcctcctaagtagctgggattataggtgtgagccaccatgcctgactttttatctcactttttgtagagacggggtatcgctatgttgaccaggctggttttgaactcctggcctcaagcagtcctcctgcctgggcctcccaaagcgttgagatcacagacgtgagccaccttgcctggcctacttcctttcttcctgtaaaattgccttgttggtttgtctacttgttttctgttcatcctgttcactcttgtctccagctcctagaacagtacctcacacagagtaacggctccatgtgttttgtgacagggaagcagacagtgtggcttgttggagaggagccacatacccccgccccccgattcatacatggtgtgactcagcccgaaccattgctcagttgagttggatttgagatgatgcactgcccactcccgtgatacagctgtgtgtgaggtcagcacagtcttggggtgctgccagacaacttagtttgaattctccctttgactcattggaacctagacctcagcaccaaagatgtccccataccagtaacccgggcaacagaatgcagataaaggacaggagacaaaaggcgcaggttctgacacattctttgcttgtgtcatcagctagcaagtattcacaggcacatccaacctccatccttacattccacaaggatttgagtgtctgttataggcaagggacaatgctaggtttttttttctaaaaacaaacttggggctgggcatggtggctcacacttgtaatcctagcactttgggaggccaaagcgggtggactgcctgagctcaagagttcgacaactcttggtaacatggtgaaaccccgtctctgccaaaaatacaaaaaattagccagatgcagtggcgtgcacctgtggcccagcttctcgggaggctgaggtgtgaggatcacttgagcccgaaaggtgaaggctgcagtgggccgcgattgcaccactgaactctagcctgggcaacagagtgggaccctgtctcaaaacaacaacaacaaaataagaaagaaagaaagaaaaagcggaagtgagagatggatgtgcgtgtagtcgtgtgggataattgcccatgggaaggaaacagaattcaacctcttggaatgtaggggg[136 bp omitted]atggtgaaaccctgtctacaaaaaatacaaaaattagtcgggcgtggtgttgcacacctgtaatcccactacttggaaggctggggtaggagaatcacttgaactagggaggcagaggttgcagtgagctgagatcgcaccactaaactccagcctgggtgatagagcaagactctgcctcaaaaaaaaaaaaattggactctgggtgaaataagtctgttggggacaaaatctggtgggagacccagaaggtcaagctgctttagaaagagctcaaccactgactttcctctttttgaccacatgactcttccaggtataaaagcctgccgttggtggaaaaggaaaaggtggtccagttagacaagatgccaccggcttctgaaaccagacatctttgaaaacccacccatctacctgcaggaaaaggcaagggacctgacctcgcctgggctcagggaagaggttgctgggatcataaccccaggaagagacgggatggaaggagagcatgcagggagcagaggacaggctactctccaaggaggagagggaagaggccacagaaatggaaaaggggccaggacaagtcagtggagagatggtcagggcctggcgaggaggagcaggacaaaagcggtggagctcagccccgtggcggcagggccactcccattcatctggtcctctacttctgaagttctcgaatgcagaatgagatgtacagatgggccagcaggtgatatgctatctgtcataggttaaggcctcattattttattcatttttaaacttttttttttttgagacagggtcttgttctgtcgcccaggctggtttgcagtggtgccaccatggttcactgtaaccttgaagcccctgggctcaagtgatcctcctgcctcagcctccagagtaacgaggactacaggtgcacaccgccatgcccagctaatttcttaacgttttgtagagaaaggctctcactgtgttgcccaggctggtcttgaactccttgactcaagcaatcctcctgtcttggcttcccaaagtgttgggattacaggtgtgagccactgctcccagccacaagttttattttaaatgtttacctttcaatgatcacttcgaggagatttaagcttactctttcttttttttttttcttgagatggagtcttgctgtgtcgtccaggctggagtgcagtggtgctatcttggctcactgcaacctctgcttcccaggttcaagtgattctcctacctcagcctcccgagtagctgagactacaggcatgtgccaccactccctactaatttttgtatttttagtagagtcggggtttcaccatgttagccaggttggtctcgaactcctgacctaaagtgatctgcctgcctcagcctcccaaagtgctgggaggcatgagccaccatgcctggctcattgtctagtttttaccaagaagatgatgagatatgccagagggctccgtatctgctatgagaacgtcccccaagagcagctggccgtggtgctgcagctggagctgtgcttggagctcttcttcacccccatggcggtcaccaccttctgccactggcactttgtgcagatcatgctctctggccccaagtggggacctggaggtgctgaagagccaagagactggctgccgtgaccctcttcaacttcctggtctgcttggaccctgtgctttgtctcccatggtgggttcccccagtggaagagtcaaattggtgggcaggcgcagtgttgttcagtgctctcgatgctgcattgaccccttgattttctttgtttttgtttttattttgttttgttttgtttttgagatggagtcttgctctgtcacccaggctggagtgcagtggtgtgatgatcttggctcactgcaacctccgcctcctgggttctcctgcctcagcctcccgggtagctgggattacaggcacccaccaccacacccggctaatttttgtatttttagtagagacgaggtttcaacccctactcaggctggtgtcaaactcctgaccgcaagtgatctgcccaccttggcctcccaaagtgttgcaattacaggcgtgagccaccatgcccagcctaaccccttgattttctgtttctcttcctccaccgtgcgcaaagcctttgacagagggccacggaggtggcagcacggcgggggtctcactgtctgggtggtggtgaaagctctggagagccagctgcagagagaagatgtggatcttagggacggccaatgtcaccttcacaggagattagaggcgccagcttggggtaaccttttggggaaggagggctcaaaaagaggaacaatgaaacagaactaaggtgagttctcctgtgcccagtttcagaggtcaaggagagtagtagatagctcaaacccaactcagccattgagtgagtgttttcattttgttccttggggtctatgatattttctattttcttttctttccttttgttttggtttgtttgtttgtttggttggttggttggttggttggttttagagacagggtttccctctgtcacccaggctggaatgcagtagtgtgatcacatcacactgcagcttctaactcatgggttcaagccatcctcctgcctcagcctcctgagtagctgggactccaggtgcacgccaccatggccggctaattgtttattttttatagagacagggtttcactatgttggccaggatgttcaacaacttctgccttcaagcgatcttccctcctgggcctccccaagtgctgagtttacaagcatcagccaccacacccagcctatgacattttcttcattatggctggtactgcctcatggtaagccacaagcctttttatcttgtaatatcagagtcttggaattctttatcttccctactctatatctagaagacagtagcactgacttatctgctgcagagctcttaattctatccttggccccgattcagaaaagggggttcctcatgctggatctgaacaacccagcacaggcaagtctggggagcaaggcaggagcctgcatgtggactcaaaggaccggcacccgaaacaaagcagtggctggcacaggtggacaaaccaggcaagaaaagcaactgtccttcggagcagagtccacgtgatgggaagaaacaggtcatgatacttttgagtggttacatcctactgtgtttgtgccttcttttttcctttctcagtcttgccaagagacccattaatttgtcttttcagaaaaccaagatcctctccagcatttatctttgttttcttgttgcattgatttctaatcttatctttattgtttccttccttttactttattgagtcttctctgttgctccttttctaacatgttaacttggatgctcgttcattttagcctttcttctttgctaatgtaagcatttagtgtgttggatagatttccctctaagaacagctttagtgggatgtcacaagttttgatttgcagcattctcattattttgagttctaaataggctccaaattccatgggatttttttatttgactcttgactttggaaatgtaccttaattttcaaacacagatgtttcccccctttatccttttgttattcatttctaactacagagtattgtttcaatggtatcagttctttgaaatttgctgagaattgttttttggcttagaatataaacagtattctagtattccagtaatgaaaagaagatagattctgtaattgttgggtgctatgttctctgtatataccttagatcaaacttgttaatttatgatgttcaaatcttcataacctttatatacattttcatctatttaatctatcagttatatgaagaggtgtgttacatgctccttctatcatggtaaatttgcctatttctccttgtagttctgtctccctggtgaattgaaactttcaaaattctttctgccttaacattgattttgtctgatattaacagagccacatcaacttggtttttgcttattatttgccagtccatctctgtccatccttctacattcaaccttgctatatctttatgttttaaatgtgcttttcctaagcagtgtatagagtggttggatttttttgtaatctggtctgacaactggacaatatttgtcttttaactgtaccattttgtccatttatagttataaaataataatttccaatatatttgaatttatctctgtcatcttattttaaatacttttagtgaagtatgtgcacatatattgaaatatacatgcataccgtgtgtattagtccattctcacgctgctagtaaagacatacccgagactgggtaatttacaaagaagagaggtttaattgactcacagttccacggggctgggcaagcctcagaaaacatagaatcatggtggaagggaaagcaaacaggtccttcttcacatggcagcagcaagaagtgcagagcaaaatgggagaagccatctgataaaaccattagatctcgtgagaactcactcactatcaggagaacagcatgagggtaacccaccccatgattcaattacctcccacctggttcctcccatgacacttgggattatgggaactgcaattcaagatgagatttaggtggggacacagccaaaccatatcaccatgcatggccaaataataagtgtacaggccaaataaactatcacaaatatcacagagtgaacacacctatttaagaaaaagcaaaaagtctaccatattattttgtgctttttatttccctcatcttttattttattttattttattttattttattctattttattttattttcagacacagtctcactctgttgcccaggctgaagtcaacggcatgatctcagctcactgcaacctccacctcctgggttcaagcaattctcgtgcctcagcctcccaagtagcttggattacaggtgtgtgccactatgcctggctaattttggcatttttattaaagacggggtttcaccatgttgaccaagctggtcttgaactgctgaccttaggtgatccaaccacctcggcctcccaaagtgctggtattacaggtgtgagccaccttgccaagccatccctcaccttttaatatttctttttttcttctctctagccttcttttgagattcagttcgtttatttcttttctttctcatttcatttattcctccactgacttggaaactgtatgttctgtttccattatttagtggttattttaaacactgtaagatggtaggagttcctcaatgagttactccctccctcccttccttcttccctttaataccacacatcaaggaaaacccaacccaagtagcttcgaactatgtgaatctagggcagcagttttcaaagcactgtctgtgaggtcaaaactattcataatgctattaaaatgctgattgctctcttcaccttcattatctcacaaataatgtgcacagtggaggttttgagagctacgtgacgtgatatcatgacggaatgaatgcagaccagataggaaaatacagctgtcttctattaagccaggcattaaagagatctgcaaaaatgtaaaacaatgccactgtcacgaattttttgaagatatagttgttttttctaggaacgtgtcatttatattaacatgtaatggttttatggttattattattataagataagttaatacacatttttaaatttttctgttttaactttgttttttttttgttttttttttttgttttttttgatacgcagtttcactcttgttgccaaggctggagtacagtggtgtgatctcggctcaccgcaacctctgcctcctggcttcaagcgattctcctgcctcagcctcccaagtagctgagattacaggcacaagccaccatgcccggctaatttttgtatttttagtagagacagggtttcaccatgttggtcaggctggtctcgcactcctgacctcatgatctgcccacctcagtctcccaaggtcctaggattatagatatgagccaccacgcctggcaggaattttcatttttgcttttctttccttttttttcttttttcttttttttttcgagacagtgtctcactctgccacccagggtgagtgcagtggcatgaacacaactcactgcagcctcgtcttcccaggctcaagcaaccctcccacctcagcctcccaagtagctggaactacaggtgcacgccaccatgctcagctaattcttgtattttttgtggagatggggttttgccatgttgcccgggttggtctcaaactcctaagcttaaagcaatccacctgcctcagcctcccaaagtgttgggattagaggggtgagccaccacacccatcccttcagtaattttcaagagtataaaccgaccttgagatccacaagtttgagaattgctgacctggtgagatgacagacaggattactctgctaagtgcaattgtgcacatataaaaccttctgctacctgatgtgtctttaatgattcgaaatttcataaagtctaatgccacttaacctctcaaagtgagtttaaagtttgcctgataaaatgcaaagcttgttgagatattaaatatgatacttaacaatcagaactattccatgaggagataaagaagtaacaaagccggctcagatggatgggatgtaattgcgccgcacagacctgtattcaccatgttatgttagttcctgttctaaagatgctttttttttttttttttttttttttttgagacagagtctcgctctgtaacccagactgctgcagtgcagtggcatgagcttggctcactgcaacctccgcctcccaggctcaagcaattcttatgcctcagcttcccgagttgctgggattacaggcatgcgccaccacacctggcaaatgtttgtatttttagtagagatggggtttcaccatgttggccaggctggtcttgaactcctggcctcaagtgattcatcaacctcagcctctcaaagtgctagaattacaggtttgagccaccgcgcctggcctaaggattgtttaaattggagtttttcttcttgttttatggggaaggattacttcatctacaattaggtggaatattaacccaaactatatgtaggatttccaatcttagaggctataggaactgggggagaaggaaagcataatactaattatatttgtcctatgtcatcctagggaaagtgcatatttaattcctgtcagcaaagattaaagaaagattttcagggcaaaagttataaacaggcttagtgtgttttattttgaacgggggaattcacaaagcctttgtgaaagcctcaattttactgttagactacttgatagcacctagttaatataagctagggcgattcaactagttccattgcacctcccggtaaataaatggttcctgaggcattgtgttaagcgaggaatggaagtttgaaggttaccggcaaggctccttcagccctctccggttttcaggttaatggtggggagagtgagtgtccaccagaaagggactgtgatgtgacgttaggtcacttgatttctgtaaacttatgggagacctttctcctaaagatgggctcaagatgccaccatttacaatgttactctcaatgaccttggggaagtcctgctcctaggggtgggacacagtgataagagggaggggtgtgccgggcatggtggctcatgcctgtaattccagcactttgggaggctgaggcaggcagatcacctgaggccaggagttcaagaccagcctggccaacatggcaaaaccccatctctactaacaatataaaaattagctgggcgtggtggtgtgcagctgtaatcccagctacttgagaggctgagacaggagaatcacttgaatccaagaggcagaggctgtagtgagccaaaatcatgccattgcactccaacctgggcaacaagagcagacactccgtctaaagcaaacaacaaccaaaaaaaaaaaaaaaaaacacaagaggaaggggtggaagagtgtactgattgttggaccctgaggattgcaattttatcataacattctctacagtctcttttcaaaaatgaaccagcaatcagagatggcaccgattggtttggccttcttagcaacatctctcccttgtcctctgccatgtggtttggtggagctgactttacccccagctcctgctccaggggcaggtgtgaaaccaggaccctgctcatctacagttcatcctctgaccacagtgatggttcacacttgggtgcatgactcaatccagaccaatgaaagatgaacccaggctgggcatggtggctcacatctgtaatcccagcacatgggaaggctgaggcaggcgaatcagttgaggtcaggagtttgagaccagccaggctaacttggcgaaaccctgtctctactaaaaatacaaaaatgagctgggcgtggtggtgcacacctgtaatcccagctacttgggaggctgaggcggaagaatcacttgaacacgggatgtggaggttgcagtgagccaagaccatgccactgcacactccagcctgggtgacagagtgcacccactgtggatccagcctttttttttttttttttttttgagacagagtctcaccaggcttgagtgcagtggcgttaatcttggctcactgcaacctctgcctcccaggttcaagcaattctcctgcctcagcctcctgagtagctaggactagaggcgcgcaccaccccgcccagctaatttttgtatttttagtagagacggggattcaccatgttggccaggatggtctcgatctcttgacctcatgatccacccaccttggcctcccaaagtgctgggattataggcatgaaccaccgcacctggccagcccttctcttttaaccaccaggagaaagaacctctcttctactgatcttgaacttgaaggctggtccctctcttctgggggccattgtgaagagaggctgcctaagcctgaagtcaacttaaaggaaggtgaaacagagaaaaaccacacattcaggcatttgatgtcctaaagcagatctactctggggatttttagatttgaaaaccaaatattctccttccttagcttaaagcaagtttgaagctgagatggacataatgtaattgctctgcacaagcctgtatattcattgctttatgctcatccttgttctaaagattagccttttgcccattttctaattgaattgcttgattgtgttttgttttactattgagttttgtgagacatttatttagagtgtctcgctctgttgtccaggctggggtgcagtggcatgatctcagctcactgcaacctccgcctcccgggttcaagtgatcctccctcttcaacctcctgagtagctgggattacgagtgtacaccatcacacctggctaatttttgtatttttagtagaaatggggtttcaccatgttggccaggctggtctcaaactcctgacctcctcaagttgatcagcccaccccggcctcccgaagtgttgggattacaggcgtgagccactgcaccagccaacactgagtcgtatttctttagatttttgtgattgatgttcccattatgcttctctctcactgaatctcctaccttcttcatcagaggcagcgtcatactggactttaagtgcatccttcctgtccatgattttaaattgtaccttgcaaatatactttgcacctaaacactgtttagtattcttttgcgttttttcaaatatccataaatacctatagtacaagtcattctgcaactagctactttctaccccaaatcatccctttgctatctggcctccatcactaaaccttacatatctcattgatttattttgtctgctctagcagtccatcatattaataagacgagttttattttttccattctactattgatagacatttaaatcacttcccattctttgccagcatgacaatgctgctttgaacatccctgtgtgtgtctcttcgcgcacacgtggaagagttcttccactggtaggcacagcatttgcattctccatttcagtaaaagctgccaaggtcctcttcaacgtgatggcgtaaatccagctctttctgcaagaaggctcaccagccttcccaccagctcttctccccaccccagccctgcagccctgcagcctgaccctaggtaatgagtggtggggagtgacccaggcatgcacgacctgcccagaggaaagggagttcaaagaaggacccgagaccctcacaggaacctagcagattggcacaagtgccagatgtatccaggacagacactttccccaggactccaggggtaaaggagtgccccacctctccactccttgcctttcttaactgaattcagattgtcgtgaacattcaagaaaagcattgtggctgacttccaaggttactacttgagtccatcactacagcagttactactcttactgctccagaccgtcattacagcagttactactgttaccacttgagaccatccttacaagactgaaggaagggaggaacgtagaaatgaaaaccaaggaaaaaaagaaactgctttaagtaaaggctagcatggggaagaagagagctccccgcttctagtgagcaaaggcagcccccttatttattgggtaacaagagcacgaggaggtggcaacaattggtcagctgcttaattgatcagaggttcatgttgttactgacaggcttctattatgcctaatcataagaaacatttgttcagcttccaacaaagctgaagtttaaatgatgcaattacattcagcacagaggagtatctcccccaatcccaccatataaagagaaagcacatgcatgcaggagagaaacagtgaatggaaggctaggaaatcttggtcttggaggagagtgcagattggagatagagggaaggggaaaataagatgctgggatcttgagggaggatgtggggtggtggccaagctccctggttcatggggatgagaatgaagcctctgttggctctgggtcatgtgacatgggccaagataagacatggttcctgcagagagatggagcgtggtctgtctgtcttgtgctcatgtgtctgtgtcaaatggcttccgagggaactagagccacttaggtctatgtggtttaaggaaagcacaagtgaaaagaagccaggaatagtgcagaggtaggggatgggacaccaagacatgaggccagagtgtgagacagaatcagagctcctgcctgcagagaatgatgggctgtgtgaggagccctggccctctgcggacattttaataagtggccccactttcttaggtgctcatgtgtccggggattctagggaggttttgtgaggctgagctaaaaaaaataaccaattccagctaggcacaggggctcacgcctgtaatcccagccctttgggaggctggggtgtgaggattgcttaaggccaggaggtcaaggctacagtgagccatgattgtgccgctgcactccagcctgagcaagagggtgagaccctgtctcaagaaacaagcaaacaaaaataacctattccactttgaccctgaatagggaaaactgaccaaacaaggagagtagccagaggcagggatggaagcataggagaaactggcagtggacaagctcctttggaataatccaccaagagaggaaatgaaacagaatgcctgaatgaattatgaaagcagaacaaagtctgaaagaataatcagggcttgagatctagaaaggatcaatgagatttgtgggaacagactttcaggggaaacacagagggctaagcggcctgagaaacagctcaactcttgaccttcctcttcctgacacatagcaagctcaagtgtaaaagttcttggttcctgggggatcccgaaatggcagaggtggctgtatctatgcaccttattcaacaagttggtaaaagtccacttaaggctgatcaccaagagctgcctgcttagaaacaggaggaagctagatacctaaaatactcccagcacgtcctgggagatgacaccctaagctctcacctgggaaaggaaaaggatgagagacccaggtgactgcaggttcaccttgctggggaacaaggttttctcaccttcatttccagtgcgggagggaaaccagaatagcaaaagatcaagaaaactgaacaaaaactagaagagaaattggtggagggatgacagaggttgaaatgggaaggcaccaagcagaatcaggtatcctctacagagcagagaattgccctgagcacagaatgctatatcattttctcaaagtcacagagctgggaattgccaacagtgggactgggatccagatctgctcccctcattacttattctccctggatttctcttcagagtggagcaatgccctggcattcaactcgtctgtgatatgacagtcctcacactctgtgtagtgacctactatgagtggtacctgggcgctgcctgcctagaattcatccctccttcttctggtagcagcatcccaattttcctctagttaaccactccccctctactcttggtctgtgggatgtggggagggggacagggggagaaggggaggttggccccattatcactgcagggcatgcaacccagacttggcaatctcagtccatctagagtcaatcttttctagactcttctagactaattcagaaagcagctttctctttccacagggtggttaggaaggtagaaggtaatcctggagcttcccgccaccacgcaggaggaatttgcctgagagcaaagccagcatagagaagcagagctgagtcatggagacaggtggctgaaagtttcatttcggcatatggatctcaccattcctgaagccactttcaactcttcaatttcatagctaataaattctcatttttgcacaattagctgaagcaaggttttttgttacctggaagcaatgaatgcaaatgttttttaggtaatttgttaatagtaataaaagataaagaatataataataaagaataggggcatttccagggccgggcacagtggctcacacctgtaatcccagtactttgggaggccgaggcgggcagatcacttgaggtcaggagttggagaacagcctggcaaaaccccgtctctcctaaaaatacaagaattagccaggcgcagtggcacacacctgtaatcccagctacttgggaggctgaggcaggagaatcgcttgaacccgggaggcagaggttgcagtgagtcaagatcacaccactgcactctagcctgggagatggagcaagactacatctcaaaaaagaaaaagaataaagtcatttctgaattgtatcttttatgattttaaaaaatgaatcagagaagattcaaggcacattctgacatgcaagggttacagtcacagcccatgggccaggcatggcacttcaccccagtatgctggcgacggccctctctgcaccaataaatcagatgcctgcttaacaactatttcaatcagaagtgcattctgcagttttgaaagtttccacacgtattatcactcctcagtcataaaacaatctgatgaagttagtttctaatgccttttttttttttttttttgagacaaagtctcggtctgtcacccaggccagagtgcaatggcatgatcttggctcactgcagcctccgcagttcaaacaattctcctgcctgagcctcctgagtagctgggattacaggtgtgcaccaccatgcccagctaatatttgtatttttagtagagacggggtttcaccatgttggccaggctggtctcgaattcctgacctcaaatgatctgccaacctcggcctcccaaagtgctggtatgacaggcctgagccactgcacctggctctgaccacacgtcttccatcaaggacttacatcattctttttggccacccagaacctctgaactccctgcctgtgaatctacgcctgcccaagggagaagcagaaacttgctttctcagagtcggctcccatgtagggcacaggcatgtgaccaaagtccagccagttaccaagcccaggtgggggcagtgcagcatagctgtgacgttaggcccggaggccactctagggagctggcagcacacagccagctgccagggcggcagagagaggtgccgagggtgtggcagcagtgcccagcgtgtgaaccgcagagtgtgcgccagtggtggaggtggtggtgtctgcaagggtatcatccaggcataccctccaagcctggtgttctggctggcctggagattccacaagctacctaataccctttaaaaacaaaattcctaggctgggtgggatggctcacgcctgtaatcacagtgtctggggaggccgagatgggaggatggctccaagtgagaggatctctggaggccaggagtttgagatcagcctgggcaacatagtgagatcccatctctataaaaataattttaaaataaaataaataggccgggcatggtaagctcacacctgtgatcccagcactttgggaggccaaggcaggcagatcacctgaggtcaggagttcgagaccagcctggccaacatgatgaaaccctgtctctactaaaaatacaaaaattagccgggtgtgatggtgggcgcctataatcccagctacttgagaggctgaggtgggagaatgcttgaacctggaaggcagagattgcagtgagccaagttcgcaccactgctctccagcctgggcgatagagcaagactccatctcaaaaaaagtaaaaaataaataaaataaataagaacaaaattccttttccgcttaacctgacaagaggagagtctgctgtctgtagtgggaaacctgacagatacaatcaggagagcatccaaggtctccaggcggacagtcctctgcagctgcatcctgtctgtgccattggtccctctgccagcctcttggccatgtgtgtagcctgggaagaatgctgccctgctccacctgctgtggcaactgccactatgcgagatggccaggctgctccagctcccacagtggctcgtggtctgtgcctccgtcagtctggcttctcctggggcagcggctaccggctggactctggcccaggaacagggctttccctgtgctcgcctgcacctcgcaccatggtcctggccccacgacgactgaatctgccagtctccactcccctgtgcactttctgcactacagcagtgggatgtggtgacaggaacactaaaggattgaatgccgggatcctggagggaaattgaagctgctggtgcttctgcctgggtcctaggggagcaggaaacactgtggagtacttactgtgggctcagcacagttccattttaattgacaaataataattgtatctatgtatgggatacaatatgatgttttgatccatgtttacaacgtggaatgattaaatcaggccaattaaacacatccatcacctcacatactcatccttttcttgcagtgtaaacatttaaaatctcttttcacggctttgaaatatacattacattattatttattataaacaccattatgtgcaattgatcactaaagctgactcctcctaactgaaactttgaagtcttcagtcagcgtcttccctttccccatccagccccttcccccagcctctggtaaccagcatacttctcgccatgagatctgcttctagatcggctttttaagattctccatgtaagtgagatcatgcagcacttgcctttctgtgcctggcttatgtcgctgagcagaaggccctccaggctcatctatgctgccacaaatgacagggtttctttctttttcaaggctgactagtattccactgtgtatctacaccacattttcttttcttttctcttttgagatggagtttttgctctgttgcccaagctggagtgcagtggcacgatcttggctcactgcaacctccacctcctgagttcaagtgattctaccacctcagcctcccaagtacctgggattacaggtgcccgccaccacacccgtctaatttttgtatttttagtagagatggggtttcaccatgttggccaggctggtctccaactcctgacctcaagtgatctgcctgcctcagcttcccaaagtgctgggattacaggtgtaagccaccgcgcctggcccacattttctttagcgattgacctgatgatggatatctaggttgcttcctcatcttggccattgtgaataacactgcaatggacatgggtgtgcaggcatctctttgacatactgatttcaattcctttggatttacacccagcagggggatttctggatcatatggcagtgctacttttacttttctgaggaaactccgtactgttttccataataactgtattaatttacatttccgtcaacagttcggcgctatttcaaaggtttcctgtgctctaaagcactctattaggctctcgttgcagggatttggggaaaaaaagacactcccttgtccagagacatggacacctgctcgcatcccaatttgcctgtcattcactccttcatcaactgctcccggccaggacttgttcaagctgctgagaatgttttggtgaacaagacaggaagcggcagctctcgtgaagttcgcgttctggaaaagcaccggtgttggaggaacagcggttggaccttttccggcctggaatttgggctccccacaaaggagatgcactttagatgattattacttgatcaaactaataaaaggcccgagatagttaataataatgaaagcgtggcttcctcctccctgtttctaggccaagaggtggcaaggggtagcaaattaaaaacatacatattggtttaacctgaaagtatgtctatgtgcacagctctttttgctaaagacagcaaaaagtttttactagagcaacctaaaaccaattctgtgacctgagtagcacctcttaccaggaattgttgacaaaagatgaataaatagaacaatttcagattctggtaaagcaccgtgaagaaaacaaattgattagtgtaataagaagaggggaattccttttttatatttatttatttatttatttatttatttatttatttatttatttttgagacacagtctcactctgtcgcccaggctagagtgcaatggtgcgatctcggctcactgcaacctccacctcccaggttcaagtgattctcctgcctcagtctcccaagtagctgggactctaagcacccgccaccatgcccgactatgcgtatttttgtagagatggggtttcaccatgttggccaagctggtcttgaactcctgacctcaggtgatctgcccgcctcagcctcccaaagtgctgggattacagtcatgagtgagccactgcacctgacctatttttatttattttttgatacagggtctcactctgttgcccatgctggagcgcagtggtgcgatcttggctcactgcagcctcgaactcctaggctcaagccttagccaccagaatagctgagattctaagtgtgcaccaccacccctttttttccttttttattgttataggcatgggggtttcagtatgttgcccaggttggtcttgaacccctggcctcaagtgatcttcccacctccgtctcccaaagttctgagattacaggtgtgggccaccacacctggcccaggactcctttagatggagtggccaggaagggctctctgaggacagacattggaaagatgacagagaggcagctgtgagagggtgtggggcaaggacgctccaggcaaaggcaacagcagagacaaagatttccacgcaagacaagctcagtgtgggctggagacagtgttaggagacacggtgcatccacagaggtctcctgcaggtgcactggagagacgtggcccagaagcagggcaaggtgtgctgggaaagagaacgtggaggtcagcaggccatcaattcccctggaaccacacctggatgaagccgaactagtaaaccttttccaagcagaagaaaagatctggggtccaagccaagtgatcccactgcccaaacacatacctggtgggtcttcacctggtgggtctgcagctgaaccctggagtgcaaatgaaaacccactaggactcaggataggagggaacaaatatgagagtagtcccaggtgtgatgaaggagtggacctaccgggagatcaaggaatccaggttaccatgaggaaggacaaacacaaaacacacagtactgactgtgtcccagatcctgacccaagacatttatttatttatttttgcgacggagtctcgctctgtcacccaggctggagtgcagtggcatgatcttggctcactgaagcctccgcctcccgggttcgagtgattctcctgcctcagcctcccaagtagctggaattaaaggagccgcccccaccacgcccagctattttttttttttttttttgagacggagtctcattctgtcgccaatttttgtatttttagtagagacagggtttcaccatgttggccgagctggtctccaactcctgacctcaggtgatctgcccgccttggcctcccaaagtgctgggattacagacgtgagccaccgcactcagctgcccaaaagttttagatacatcaacccattcagtcttcacaaaagcccatgaggtgggcactatcatttcctccatttagagggaaggaaaccacagcccaggagactacaggacttgtccaagcacacacagctggagggagcccagcaaggctggaatccaggcagtctgcatcccagtccatgcccttgcctgccactctacatggcctcacgagatgcctctccaggtacctaaatgtagaagtcaaaggaatactgtggaagcagccaaggtctgcatttgggaatccatacgttagattcgtggaatcagttctggagaaaaggtggaatttttcaggtttttttttcatagaggtaatcaactaccaactttccaatggacacagcccatctcagtgtgaaagcctgtccctagagcagagccagaggaggtacagccagctccgactctgcaacttcagtaaggagcaagaagatttctgtttagaggttaccactccactccccaacaaaaaatgagagtagagcaaggtttccaggcagctgcctatactccgggaaaggatgttggtggagaaggaatcgagagagggccacactgttgggggcaaggcaaggggctcactgccaagggacagacagaaccagggaaggcaaagatcacagaaagggaacgggagtgcagagcttctaatggagagactgcatgatgctctcctgggctggagctggggagctgggaacagctaaggtatgcccacaggcacagaggcatctcttctgccccttggaacttctgactcggaggctgtcaacattccctctcttgagcaggagcaggatgggagaagttgcagctagattgctttggagtctatccagcatttggacataacctgtcccttgtgtggtcactggaaagaagttaagaactgctcctaggctggacatggtggctcacacctgtaatcctagcactttgggaggccgaggcaagagcatcgcttgaggtcaggagttcaaggccagcctggccaacatggtgaaaccccctctctcctaaaaatacaaaacttagccagccatggtggcacatgcctgtagtcccagctactcgggaggctgaggcaggagaattgcttgaacctgagaggcagagggtgcagtgagccgaaatcacgccattgtactccagcctgggcgacagactgagactccatcttaaaaaaaaagagaactgctcctgtgtagagttcagttgaggccaggcacaatggctcatgcctataatcccagcactttgggaggccaagccgggcagattgcttgagcccaggagttcaagaacagcctgggcaacatggcaaagcctcaactccgcaaaaaatataaaactaagccaggcatagtggtgtgcgcctgtagtcccagctacttgggaggctgaggtgggaggattgcttgagcctgggaggtcaaggctgtagtgagccgtgatggagccattgcacaccggcctggatgacagagtgagacccggtctcaaaaaaaaaaaagagttcagttgtctggttacaactgcagaaaataacctatgtgtggtggtccattttcaattctaagtgccttaatataggtttaaacaggctacaaagagataaagaagcagaatgtactaagtcacccccccacccccaccccctcctgcccatcctgcttcttgctttccctttcatctagctgccaggcgcctatcagtcaggacctccttaaccatccccttccacccctccaaagaatttagttgggccaggcacagtggctcatgactgtaatcccagcactttgggaggccaaggcaggcagatcacctgtggtcaggagttcaagaccagcctggccaacatggtgaaaccccatctgtgctaaaaatccaaaaattagccgggcacctgtaatcccagctactcgggaggctgaggcaggtgaattgcttgaaccgggtgggcagaggttgcagtgagctgatatcacgccacttcattccagcctgggcaacaagagtgaaactccgtctcaaaaaaaaaaaaaaaaaaagaatttagtttaggctagcttgcaaagtaaataattgtactctttcttatcagctaagtccagtcactatggccataactcaaatgtttgaagagtcctgagacagttgcaatgcattatgggctgcaataaaatgcagcagaaagaccctaaagaacatactgaaatccttaacccaaatatcaataggtgacatgcagaaagattgtaacccaatagtactcagccagtgaggaactaggggagggacttgtgcacttgggaataaattgcttgttgaaatcgttgcaggtgtgcccgcatgccagacaccccatcttgcaaggcagccactaaggtctcgcttctgctgttctcccatccctaagtccattctttggtttggacaagtgagtgtgtttgttttttctttttctttttctttttcttttttcccttttatctagctgccaggcacctatcagtcagggcttccttaaccaccccctcccacaccaccaccgaggctgcagtgcagtggcgtgatcttggctcactacagcttccacctactgggttcaagcgattctcctgcctcagcctcccgagtagatgggattacaggcacccgccaccacacccggctaatttttgtatttttagtagagacgggtttcaccatgttagtcaggctggtctcaaattcctgacctcaggtgatccacctgccttggcctcccaaagtgctgggattacaggtgtgagccacggcacctggcagagtttgtttctcacacaatttacaatagaggagtattctgccattttgcaaagtgttctcacatatgttacctcatttattctgagagagagggaggattattgtgggaattggctcatgtgattatggaggctgagaagtcccatctgtctgcaagctggggaaccaggagagctggtggtgtaattcagtccaaatctgaaggcctgagaactgatgtctgagggcaggagaagatggacatcccaactcaatagagagagcagagacagaaaacttgctcttcttcttttttttttttttttttttttttgatatggagcgcctgccaccacacccagctaattttttgtgtttttttgtggagacagggtttcgccgtgttggccaggctagtctcgaactgctgacctcaggtgatgcactcagctcagcctcccaaagtgctgggattacaggtgtgagccaccacacctggcagagccaccacacctggcagagccactggtttttttttttttaattgacttatttttcttacatataatttagccttaccctaaacaaaaataaatattaataacagtaacagccagcaattctaagtacttgctatgtaccaggcatatacatacatacgtacatatgggattttttgagacagagtctggctctgtcgtccaggctggagtgcagtgacacaatcacagctcacttcagcctcaacctcctgggttcaatcaatcctcccacctcagcctcaaaagtggctggaaatataggtacatgccaccacacccagctaattcgtttgtatattttgtaaaggcgagattttgccctattgcccaggttggtctggaactcctgggctcaagcgatctgcccacctcggcttcccaaagtgctgggattacaggcataagtcactgtccccagcccagcccagtacgtatgtttatagacaactataaacatatgtatacacacaacatgtggttgtgtaaagatgtgtaatacacatacacacaaacatatacatattcatttcaatcctcacagcaaacctacaaggtaggtatattagtctcctcgttctacaaatgaggaaactgaggcccagagaaatgagtgcccttgcccaaggtgacacagccaacaagtagccgccaggactgcagcccacagggccagctccagattccacgcttttaacccctgaaatcatgagtttaatggcttagctacaggttaagtcacttgccagggaacccagagctagcaatgggatgggaactgagatgtgaatcccagtagtctaacctcaaaacctgcgtgtttagctcctacatgcgttcccacatgggttatggacagctctactaatggaagagggcgctggactggggtggaattgtgaaagaactagcgacgtggagagaggcttgaagctcagcctaaataaatgttggggacagcccccactgacagctggacttggcccgccatcttcccttcttggtacctctcaatctttcgtaaaaataaaccaaaagctgacgttcaccacttcatgccatgcaaacaactgtttttggttttgttcttcaaatataaaataacatgaaacatgctttgtcaatgtacttacccccatcccatcccacactctctcttcccaaatacccgcatcaccctccactcttcagagatactagacggggtggctcagcagggctgggaacaaacactggccaatgtaaaggcttctgaatactccgcagcactggagagtctgtcttcagcacgatcccctgttaaccctaggaaagatgtgcacgtgacaggggcggggtgcgtcatggaagcctgacgttcctcatgccagatcagacgggaaggctgtaaaagggggaaggtgaggccagctggcagaaagcaggaggaacgcagccttgctccaggttcgtactcccatacctgaaacgcctcctccttctcccgcctacccaggctgaacacctggagaggggcagggtaggaatgccccctaggtgaccagagtggagaggaggacactgaaggggtctaaggatcacgagaccgcgtgtggcttgacttattcgccaagtggagattcctcgatcatcctcagagcctgtggtcccttccatctagtcaagaatgggcaggaggccaggcgagacaaaactcaaggggaaagccgtactcatttttatcaacatctccttgccaggaagcttgtggtattcactcaaatccaggacatgataaacatttacagaaaataataaaagcagatgatgtgaggacagtcaagagacgcaaagtacacttatgctccccctcctcatctagaaagtgggtctgcatggagtgtaacagcagaatctgacatagctgactccaccctgcttctaacctcacaagctaatggtctttgtcattcctgcacatcagccaagctaatcatgggaagaatttagtttacagtttaactttaaagcaaggatgacaataatcccttcccaacactcacccccaaggagataaggagggtgtacacactagcagctacatcatattaaagatttataggaacattgtgacctcagcaggacaaagaagttgcacagtgcccctcctcggacactcactgccacccagatgtccgctatcatcggtcacctcttgatcttaaacctcactctcttcccccttccctaatgtaaaaggagcccaaaattctattacttaagattgttctcaagacactaggtctgctatctcctcagtctgctggctctctgaaataatgtcatttttccttcccccaatatctcgtctcttgatttattggctgttgtgcagagattggtatgagctttggattcaactgcaggaggacggtgaagccagaagagatagagagagagagagaaagagaaatgagcagctgctgaatcatgagggcttccctaatggcagggaaagaagaaagttttgacagacagtggggcaagacacttgcacaaaacaggaagccagaggaatccttaaaacccacacatcatacaaaaataaagaaagaaaataaaacatgataaaagaaatgaaacccatacatcagatcacttactcctctgccttatacccttcaagagtttcctatgactttgggaataaaatccaaatcctcaccttggacaacagggccctgcaccatgtgttttccctccaccccctccacccccagctgtcacgtctctgacctggtttcccatcacttccctcatgctcattcccaccccacccccccagccacactggcctcctttcggtttctccatcacaccaagcttcgtatcgcctcagggcctttgcaaaaaatgtcccatctgccccgagtgttcctctcccagctcttccatggagagcacctacaggcctcggctcaaatgtcaccccttcaaggacatttccctgctgcccccagcacagattaccctattctatcatccaattctatttccttccgaaagcgtgccccacattacctcctatattactgtagagactgtactagtgtctcacccctccccacaactacaatgtcaatttcatgaaggcaagaaccatgtctgcctttaaaaaaaaaaaaaatcagggtctcactctgtcccacaggctagagtgcagtggcacaatctaggctcactgcagctttgatctcctgggctcaagtgatcctctgacctcagcttcctgagtagctggaactaaaggcatgcactaccacatctggctaatttttgtatttttttgtagagatcaggtgtcaccatgttacccaggctggtcttgaactcctgagctcaagcaatccacctgccttggtctcccaccaagtgctgggatcataggcatgagccaacacacccagccacaatgcctgtcttgtgatgctctatccccaaccatccatggagagatgaaaatgcatgatctggttgttaccttgcactcagctgcctaatccaagagacatgcaggtgactttgagaaggctggggctgtcctgggcccacagaattcagacagaagacactggggaaaggagaggaggtgggacagggaccagacacagagcactggaaaggagaggatgtgcaggagcaagagctgagccggattttccagacggcggcagactctggggggctgcctggacttggggcattttttctgggctggccctggacttagagaatatttttgtgatttagcggccccaatttttgtgaaatgtcctctgctgactgagagattaacctgctttgactgggccatgctaaaaaatgaacaggaatttgatatagtccagtgtggaggtggagagggagggaggtgaagaaagaacagaaggaaggggtaagacacactgaggagcagatggaagttacctgaggggatcctccaaagaagaaagggtgggctatgcaaacagtggatgtaaaaagacgcctggaagaagttaggacttggatttctaggagagattaattcgacttgtaggagcagggatttggggagaggcagagggctctgctgcctctgaaagagctcaccgagtgcgctccctctctctgactaaggacccctgtggataagaaagctctctgccctagagaagaagagcagtcaaggtgcttacaggctctttcccgaagactgaagacctttcccagggtggactgtggtgcccttccctgtgcaggcaccctgaccactgtgtgttcagagaagagggatgtggcacacacacctgagaagcactgggactcctgcgagaccaagtgggaggttgccactcctggggaccatctgatgggaagcagcggtgaagaaaagggaatggcgtctggatgtggatggaggcaggtgcttctactgctgcccggccagagaggagcatccccagagggtccgtccctagccaggctggaagcttgtctctgcgcatctggtcccctctcgaagcagttctcaaaagccgttgagacacactgctgggatgtggcaacacaccaagaggcaagaaatgtaagtccatggttcctggtaatactgaaaaaactaggctttggaagtttaagtaaacaaagaaatgagaggatataaggtaagctgttacaacgtcactgtcagttatgagtattctgttatgctttcttttgagccagtctcgctcttttgcccaggctagagtacagtggcatgatctcggctcactgcaacctttgcctcccgggttcaagcgattctcctgcctcagcctcctgagtcactgggattacacatgcccgccaccacacccagctaaatttttttgtattttagtacagacagggtttcaccatgttgcccagggtggtctcaaactcctgagctcaggcaatccgcccacctcagcctcgcaaagtgctaggattacaggtgtgggccatcatgcctggcccccattacactttctagagagaggaagaagtactaacctcacagtgcagactggagactgcacagcacatgcgcagatggtcttgacagaggatgcctccctctgtgctggggaactcatccttgcccattcagtttccgtggctcaagcaggctgatgtcagcccttggcgatgctgttggcgtgtgtgacccacaaatcattcagaggcagcagagccagcctggagatccgggctgtgacttcaggacaggagaccctctctctgcacaggttattatcctaaactgccaaaggtcactgcgtgaagcaattttactaagagccaccaaacccctctcttccctccaaccaagttcattcacccttctcagaagagcccaagagacctctgtgagagtaagacaggagttggcgatggtgcaatttgcagaacgccatgtttgttagcgccttgtcttcatgtggccggagggcactcctgaagcttcaaactcctgtaaaaacgcttcctgtccagggagggtggtatgggaagtctgaggtggctgggagaggaactggcgaagtaaggagttggagcaggagtcagagagacatgggatggggaaactcacaagcagactccaccccagtcagggaacctcactcaccgttccattaagggctggaaaaggaggcaccgacaggtgtctcacagaagcgaatggtagctgttcaggaggctggacccaggaaaaaggacataaaatcggggaggtgcctcaccctaatttttctcaactccagcagaaccttcttagagagcctcactcaattccacatttctcctcctctcagacaagcccggcagctccgtccacgtcctttgctgaatggagccagcgtggtcacttctgccctatcgaggaagctgaaggccctggcccatctctgacagctcagggcacaggaaagccttgcctctgcctagtctgccctctgcttccccaccagcgtcatctgtggcccacggctcttggctggacctgcactgaaggacacagctgctccgagctacacaacagggtggctgtccctccgccctccatgtgtggtggctgctgcagcaggatacagccagcctcctggctgctatcccacagtgctatggttgattgcgttcttacactggaagataaacagtgcttgtgtcaaagaaaatagaaacaaggccgagcatggtggctcatgcctgtaatcccagcactttgggaggcggaggtgggcagatcacttgaggtcaggagtttgagatcagcctgtccaacatggcgaaaccccatctctactaaaaatataaaaattagctgggtgtgttggcatgcgcctgtaaccccagctactcgggaggcagaagcagaagaattgcttgaaaccgggaggcagaggttgtagtgagccaagatcgcaccactgcactccagcctgggagtgctcatatgagcactcactctacagagaccctgtctcacaaaaataaataaataaataaataaataaaataaatagataaaaaaaagaggtagaagctggaaaagtggttatcttaggagtggaaggtttgctgactgagagggaataaaagggcctctagggtgctgaaaatggcctgcatctcaacctgggtggtcatacacaaatgtacagatatgttaacatgcatccagctgtatccctaagttgagctcacctttttgtatgtatgttacctgttaataacacaattgataaaagccccctctaaaatcccacatcttcctatggctaccatagatattttaggcttataattggttttgctccccatatttgctattcaagatctgtataattttggaactctcccctttttccttgccaacagggtcccaattttgttaggttcgggaagtgcccaattaatactcatttgcccaaactctcttgcggctaggaattgccatgagatacaatgtcagccagttggaaataagtacacatctgctgggtagggcttccagaaaagctatcattttcctttttccttctttagagacaaggtctcgctgtgtggcccaggctggagtacagtggtgccatcacagctcactgcagcctcccattcccaggctcaagcgatcctcccacctcagcctcccaagtagctggaactataagagtgcaccaccacacccaactagattttttttttattttttgtagagatagggggtctcactctgttgcccaggcaggtctcgaacccttggcctcaagcgatcctcttgcctcggcctctcaaagtgctggaattacaggcgtgagccactgcatctagaaaagttgtcattttcctgcttgaaaaagggatagatccatctctcatacgtcttttgctctctgtcctccctgccccctgtttttctgctcagaatgtagatgcttcttaggaccatgaagcgaaagccaagatctggggatagtgaaacagatagccagaggaccccaggctgtggatggatgagtgatcctgagcagcagccgtggacatgggttccctaattccttcatgtcccatgagaaaaataaacctctatgtgtttaagtctctgttatttgggcatatttgacagtcctcaaatgagatataagggttttatcttcataaatggcaaagacttctagagacagaagggaaggcttctgggtgctaattcactgtggcttcatatcatcaagtagcaagggctcaaggaaaaaaaaaagtgggggaaggaatccccaagacattcccaaaattaagactacattctcccctcccaccttctcctgagagcagtcttccctgcttcctatggaatctgaattcttctggcattggaaaaggctcagggaagatggctcaacgtgaagaggatctcagttcacgtaaactttaccaagagcgggtcttagagtgttatgtccactgcatcactgtttctcaatctatttttaaccacttcccacttctgataaacagaaactttactttctggtttgcattaagaaaaccagggcttttctctctctcttggaaaatttccaagcattttgaaacgtgctgccaactccccgggtgtgacacccgggagtttctgatatcctccctgcacttcctgaaaatctgccgtctaatttaagtttcctaagattctgcaaagcagacagaaaccctggtgactccagcgataccacaactcttaggggaagatgagtcatgtatgtggcagaagcaggtaatggaggaaaacagagacaaggttgggctggggaaaggaacacagagcaactagttttgccccccatctggtgtgtcttttgcaggatcagccagcacctgactgcaagtttccgcctccagacactctgctgcctctcctccctggctcagggtcagcactgaaaatcagcccaaggaaacgaccagctgccttctggcccttatcaagggtggtgtgaacccgcgctagctacccaggggtctggcccggaagcggcagggggagggctttttagtcctgtgtctagtccagtggtcacctctgcacggacagcagatggagaagggggctcggggaaggaggaaaaggtcaggcaacctctccaggattcctggaataaacattcctcctcccaagctcttcattctgtttcacaatcaaatccagagtcttataagcattcatggaaaccatgaaagcaaacaacttggtaaacggtagacagaaacagtaaatagaatcttccctctacttcctgtgtatccagaatgtttagagacagggagtggggactgacgacagattgcagcatctgggatctggggctatggcaggaacgaggacatgtggaaggctgggagttgcctgggtcttgggagtctggggttgaaggttactccttcatggtttcagggaaagagtgaagaccactggcaagaagcctggtaaccacacagacacaccctgcaggaagcagttgacaccatctcacaccctgacctgtcccccatgtcctcctctgtgggatgcacaggacttccaggggccaccaaagaagttgggtctaaccggggccctcacagtacagtggcgagtgtagtgcggtggtaaagaccatggactccagccgggcgcgggggctcacgcctgtaatccccacactctggaaggccaaggtgtgcagatcgcttgagtccaaaagttcaagaccagcctgggcacatggtgaaaccccgtctctacaaaaaatacaagcattagccgggcatggtggcgcactgtaatcttgtaatcccagctactcgggaggctgaagtgggaggatttctgaagtcgcaggtttcagtgagccaagatagtgccactgtactccagcctgggtgacagagtgagaccctgtctaaaaaaaaaaaaaaaaaattagccaggcatgctggcgtgcacctgtaattccagctactccagaggctgaggcaggagaatcacttgagcgtgggaggcagagatttcagtaagccatgattgtgcccctgcactccagcctgggcaacagagcgagaccctgtctaaaaaaataaaaaataaaaaaagcccatggactttttagttcagagttcagttcctccgtccaccagatgcatgactccaggcaaatcacttctttctctacatacttcagcttcctcgtccgttaaaggggatgagtgtgtaacttcctaggatgttttaagatttacatgagttcatctttgcaaagctttttgcatggcacttgatacacagtgtcatacaatacaataaatgttggctgccatgtctgctatgtcctctgtctgttgtaatgaattgccaaaaacttggtggcttaacataacagaaatttattctctcacagtactgaagactagaagtccaaaaccagtgtcacggggctgaaatcaaggtgcagggtctcctaattttccctcctttttcctctgtcctgaccaagaaacagagtgccttgaccaacctgcgacccagccagctgcgtgttttctctgcagacttgaacccaagccagggcttgaacattcccaggcactgataaaggtgtttagacactgaaagaaaccagccctggccctgggccaaattccttaaaccctcatgcaaacccctcccttgccccctcccttttctctcattgttcgtcttgaggatgctgcagcccactctgcaaattcccctccgaaatgctttgcactaatcaccctggcatttggtgcttcttgctttgggaacccatctggccccctcttgggatggtttggggaactcctcgacagaaactcccttgccacagcttttcggggtgactccagccagatccggctgggatggaacacaggtgttcagcaggattccatttctccggaggctcttgagaaaatccattctttgcctcttccagcttctggtgggcgctagcttgcagctacatcactccggtcctccaggatcacagcatcttctccccttctgtctgatttctccctctacctctttctttttgtgattacatttaggaccatctcagatagtccaagattatctccccatctaaagattctttttttttttttgagacggagtctcactctgttgccaggctagagtgcagtggcacgatctctgctcactgcagcctccacttcccgtattcaagtgattctcctgcctcagcctctggagtagctgggattacaggattacagatgcacaccaccatgcctggctaagtttttggatttttaatagagatgagacggggttttgccatattggccaggctggtctcgaactcctggcctcaagtgatctgcctgcctcggcctcccaaagtgctgggaacacaggtgtgagccaatgcgcccagttctgcctcctcctttttgtgattatgtttagggccatctcagatagtccaagatgacctccccatctcaagcttcttaatcccaatgcaaagtcccttttggccgtggttccagggattaggatatgggtctcttttggggggaccatcatttggccaccacagctggtgtgattggccaggagtgaagtctaataaacaggactcaggtggacggagagtggaggaaggagaggtctctgcagagagaggttggggtatggctaccggcagtgggtgggaacaaccacagaggcccaccaccaaggccacagagacagagtctgcagagttctcccaagaagctagccttgagacgctccttttaattttcttcttcagcaatgtaccagcccggggatgggttctgcagggactgtggaagtgaaggaccccacgactggagtgacaggggaggctgcataatagacaactaaaagagaagatgcacggaggggggtgggcataaactgttaccttcacagtgggtgagctcctctggtgaggcctctgcagggctcaaaaaaggtgatacgcaaatgaactcaggggaactgcactggcacaggggccattacgtctcaaagtccatcagcacgtgctggtctagattctccttccctcttcatccctaggagagttccatttctctctggcatcctgtacttccttattaattgtcatttatttaaaattgcacactgggtgcaatggcccacacctgtaatcccagcacttagggaggccaaagcaggagaatcgcttgaggccaggtgtttgagaccagcctgagaaacacagcaagaccctgtctctacaaaaaatagcaaattagccaagtgtggtggccaagcccgtagtctcagctacttgggaggccgaggtgggaggaccgctggagcccaggaggtcgaggctggagtgagctatgatcacaccactgcactccagcctgaagtgacagagcgagacccccacctctaaaaataataataatcagcccagacgtggtggttcacacctgtaatcccagcactttgggaagccaaggtgagagtatggcttgaggccaggagtttgagaccagcctgggcaacataacaagaccccatctctaccaaaaataaaaataataaaaacatttagaaataataataataaaacaaagttacatatctcaaatcctaagtgatcctctctgccccgggtgcacattctcccttatccatgccatcctcaatcccctcaacccctggcgactgcaacaccctcctagcggatccctctgcttccagttctgtccttctagggagcattcttcacacagtagcaggcttgatcttctagaatcatatatcacatcacatcattcccctcttatggccctaagtgacttcccactgctcaaaaatggagtcttaaggccgggtgcagtggctcacacctgtaatcccagcatttgggaggctggcaattgtttcattcattcattcatttaacaaatatatatccaccccccaggatgtgccaggatctgtgccaagcattagaaatatcatggttgaaaaatacagatgggtccaggcgcagaggctgacgcctgtaatcccagcattttgggaggccgaggcaggcggttcacctgaggtcaggagttcaagaccagcctggccaacatggtgaaaccccgtctctactaaaaatacaaaaattagcagggcatggtgacagacacctgtaatcccagctactcaagaggctgagacgggaaaatcaattaaacccaggaggcagaggttgcaatgagccaagatcacgccactatgctccagcctggatgacagagcaagactccgtctcaaaaaaaaaaaaaaaggtatatagcctggatcatcagtgctgaccatgaggaaaaaggtcctgtggcttttgctgcaagtcccttaaaccacaagacagctctcaagtgattacacgtccaggatgtcttaacaggtcccagaaaaagataaatgaggcatctgaggacaagcgtcctctgagtttttgaaatggacttatctccattctgaagtcactctcatccatctatcctccactgtcatccaggaaatagttactaagggcctaacatgttccaggctgcacgccaggtcctgaggatgcaatggtgagcaaagcagctgtgttccctgctttgtggacagtctcataaggggaggtagacttcacatccatcttaatgcaaatcctcatgctaatgaacacattataataaattgagacgtgggacataggaaggaatagtaaaagatgctatgagagcaaccaacaatgagaaaataaactctaaaaaaattaaatttacagctgcctccaaaatatttagaatcatgcaaaacctctatgctgacaactagaaagcattgctgagaggaattaaagacctaaataaatggagagagatgtccagtgtcaatgatcccaaattgatctatggattcagtgtgagcccattcaaaattccagcaggcttttctgtagaaattgattttaatatttatatgaacatgcaaatgacccagaatagccacagcaaatttagaaaagaagaaggaagttggaggacttactctatttcaagacttattatgaaaccacagtaatcaagactgtgtgcaggccgggcacagtggttcgtgcctgtaatcccagcacttcgggaggccggggcacgtggatcacttgaggtcaggagttgaagacttgcctggccaacatggcgaaaccctgtctctaatacaaatacaaaaattagccgggggtggtggcaagcatctgtaatcccagctactcaggaggctgagacagaagaattgctggaacccaggaggaggagggttcagtgagctgagatcacgccacaacactgtagcctgggagacagagcaagactccatctaaaaataaaaattttaaaaaataataaaaataaataaattttaaaaataccgtgtgcaaatgatgaaaggcaagacacagagtctctcagaagaatagagcgtccagaaatagtaccacacacacatacaaccaatgggtttttagtacaggtgccgcggcaattcaacagggaaaggaaaatctggaataattggataaggaggtaaaagcttcttaggacataaaagcacaaaccatagaagaaaaaccagataaattagaccttgtcaaaatgtaacacttttttgcttttcaagagacaattaagaaaatgaagaccaggcacagtggctcatgcctgtaatcccagcactttgggaggccgaggtgggcagactgcttgagctcaggaggtcgatgccagcttggacaaaatggcaaaacctcatcagtacaaaaaatagaaaaattagtcaggcatggtggcaggtgcctgcagtcccagctacttggagggctgaggcggaaaggtcacctgagcctgggaggtcaaggctgcaatgagctgtgatggagccactgcactccagcctgggcaacaaagtgaaactctgtctcaaaaaaaaaaaaaattaaaagaagagaaaagtcacagaatggcagaaaatattggtaatatatacatctgacaaatgactagtaccaagaatataataaagaactctcagaactcaactatatgaaaataatccaatttttcttttttttttttttttttttgagacagagtttcactctgttgcccaggctggagtgcagtagtatgatcttggctcactgcaacctctgcctcctgggttcaagcgatcctcctgcctcagcctccctagtagctgggattacaggcgcccgccaccacgcccagctaaattttgtatttttagtagagatgaggtttcactatgttggccaggctggtctgaaactcctgacctcaagcaatccacccacttcagcctccaaaaatgctaggattacaggtgtgagccaccatgcccagcctaaaattttttaaatgagcaaaatatttaaacagacattccacgaaagaagatatacaaatggctcataagtacttgaaaaaatgcttaacaccaataatcatcaagaaagtataaattaagaccacaacaaaggccgggtacggtggtccacgcctgtaatcccagcactttgggcagctgaggcgggcagatcacctgaggtcaggagttcaagaccagtctggccaacatggcaaaaccccatctgtattaaaaatacaaaaattagccaggtgtggtggcacgtgcctgtaatcccagctactcagggggctgaggcacgagaatggcttgaacccaggaggtgaagtttgcagtgagtggagatggcgccactgcactccagcctgggcgacagatcgagactctgtctcacacacacacacaaaaataccatggcatacttattagaatgcccacaattaaaaactaacaattgtcaagtgttggtgaggatgtggagcaactgaaatgctcgtaggctgctggtgggaatgcaacatggcacagctactttggaaaactggtagtttcttaaaaagttaataaaacgttttaccataccacctggccaatacactgccaggtatttgcccaacagcactgaaaacatttccacacaagaatgttcttaacagctgtattcatactagacaaaaactttttaaaaaaaacccaaaccaaccaaatatccatcaacagatgaatggataaataaaataggaaatatccttaaaacagaatactattcagcaatagaaaagatgcttaacctgtaagaggggaatcgaaatctaggaggtcagggccttttttttttttttttttttttttgagacagagtcttgctctgtcgcccaggctggaatgcagtggcgcaatcttggctcactgcaacctccgcctcctgggttcaagtgattctcctgcttcagcctcctgactagctgggattacaggcgtgcgccactatcccggctaatttttgtatatttagtagagacgggatttcgccatgttggccaggctggtctcgaactccttacctcaggtaatccacctgcctcggcctcccaaagtgctgggattacaggtgtgaaccactgtgcccagccagacagggatttcttaaggaagtaaatggttatctgaaagaaagctacaaattaactgtgaaagttggaatgggtaacaagaaataaagacataccaggcaggggctggttcaagctccccatggcagatggaaaacatgacacattcacagaagtggaaaatggccctgcccagacagcaaagagagagaagagtgatgtgagtggaagctggcaagggccatgctaggcaggcctttttaaggatgttgatatttctcctaaaagcagtgagaagtctctgaaaggacaagaaggtcgtataattggattgacatttttaaaatgattccactaatacagtatggagaactgactgccagggaagcagatggatgagaggaagtgagtcagggccctgctgaaatcctggtagggatgatggcactgagatgggatgatggagatggagacggatggatggattcatatttggaatccataagtatttggggagtacatcagactgcattctagggataaggaagaagataatattgagattcactttaagactgactctagtcaggctcagtggctcacgcctataatcccagcactttgggaggccaaggcgggcgaatcacttgaggtcaggagttcgagaccagcctgaccaacatggtgaaaccccgtttctactaaaaatacaaaaattagccgagtgtggtggcacatgcctgtaatcccagctactcgggaggctgaggcatgagaattgcttgaatctgggaggcagaggtggcagtgagccgagactatgtgccactgcactccagcctgggcgacagagtgagattcagtctcgaaattaaaaagaaaaaaaaaaaagactgactctaagataatggtgcaggagatgtgatgggaagagatcttacgccccaagacagggaagggtggaagaaggaagatctgaggccaggtctggacacatttgatttggttgatttgggacacctgtgagacacccaatggcagtgtcaactaggcagttgagcgtgtacatgtgaagctcacagaaacctagggtgaagattcaaaccaggggtgtcatgaaggtggtaactggaactacggaaacagttgcagtcgactagaaggagagcacaggcgagaacaggaaagaacctggagccaagcttgaaggaagtcaccatttcggggatgagtaggggaatggtgagctagcaaaggggtacgagaagtgaccaaaggaaagagagggaagctagcagcgtaacgtatcagaatttgtgaaaagaggatgtttccagaagggcgtggaaattgtgttgaatgctaataaaataagaaaagcgtaagtccactgaatttaggaacatggaggtcactgctaacatcgggaagagaaaatcccatggaaaataggcacagaacccagattagggtggactgaggggcgagtgagaattaagaatgtggaagtgattacacagaactttagataagggtccaacttcctgtgatgacaggctgcattataaagacgatgagagaaaactgaacttggaaggaactgtgaaggatattgctcttgtgaaagtttacccccttgaactcggtctgagaggttgggtttccttttcctgtgacgtaggtggacatcatgaactgtgagactgaaagcctccttggtgatgctcccttcataactgcggtgaacattcataactgctgtgaacccagagagggggtttcgttggggcgtcttccacagggggactcacgacagtgacggcgaaaggcaggaggtggggggagaagaacgtgcagagacagagaggcagtcccactcctcaacacttgttttccaatgagtttcctggattctgcaattaaatccagatcctcgtgcatgtttataggaaatcataaaagcgaaatgacacaaataaatttggtggcaacaagagagaatggtctctttcttagttctcctgttgatctgagaagcgacgtgtgctgggggaaggaaataaagaactagaacgccttcagaggagagtagagtggacgagaaagaaaagctaaatatcaaaatgtctagaccctggggttacagaccacaaaaagaataaatgactgactgactgaatgactgaatgaatggcaaacaataggaagtaggtatgtcctagggaaagaatggggattctgtgagcaggaatcaggccacagatggcagaacagagacttctttctgagacttcctccctagttcaagaggaaaacacgttccaacgatccttgctgcattaggtgtgtatttcaaagggaccttcaggagctcctaacctggggctaccaaggtcagagagggggaaacagtgagactttatcagggaaaggaatggagcctgagtgccactccctgacgaaaagccacatgggcacgtgaactcgggcctcctgaattcctgacactttcccaagagggacagcacatccatgccctgagcctctggaggctgcaccaagtggctcactctctgtgaagctgcgttacaggcttgagacgaggcagcacttacgggcatctgctaagtgctttatatacacaacctcactgaatcctcgcagaagtcctaggatgtcagaattcgcatgctcacttgactacagcaaactagacttcagaaaacggatctgcccccaaggttgtaatgaagggacctggatttgagcccatatctgcatgactataactcccacaccatttccatcacaacaagatgcaggccaggaccagcctgtttcagctgagacgggcaaaagaaatgtgttgggggcagagggcaggagaccatagagaaagtaaaaaaattgaagaagaaaaggaaggagtgccgggtgcagtggctcacgcctgtaatcgcagcactttgggaggccaaggcaggcggatcacttgaggtcaggagtgcaagaccagccaacatggtgaaaccctgtctctactaaaaatacagaaattagctgggcgtggtggcaggtgcctgtcatcccagggaggctgacgcaggagaatcgcttggactcgggaggcagaggttgcagtgagctgagatggcgccactgcactccagcctagacaacagagcaagattcagcctcgaaaaaaaaaaccaaaaaaaaagaggaaaaataaaaaggaaggaggaaagctcatttctgagaatgagcagaatgacagaagaaactgcctaagaaagagaaaagaaaataatctgacttgggaagtaaaaaaagaaaaatgcctgggaattttttttttaaatcaggaattaaggacagaaaaatctgaatttggaagtcaagagtgaggattctctagggagagaataaagatgctgggcctttcctttgggtttgagaggaaatagtgcttaaagactgaccttcctttctctggtcacgtggctggtgctagtataaatgcttactaccagccaggttcctcaccattttttcctgcatggcatggacagaagcaggggctaaagctctgttcctctctcctggaagcttgcagacctcccttcagaaccaatcccaagaagccacctatccggaacaacacaaggcaaggcagctagtgtagtgcttgtgctctgggaagagaggccaggatcaggtttgaggggaaggttctgggagactggaggaaggatgtcagaaccaaatggaagactcatacccagagacaggagctagtgtgaggagcaaggaaacagccaggaaatcaaggctggagagtggacagagggacaggacctgggttggggccagcaagggtgacaccccaagtggaaactgagttaccccgtgaagaagacgagttctatttatggtcagaatgccacgctcaagggccagtgaaggcctgtgggcttttctgaatatttctctaaggtcttctagggacaagccttcctcctaaggctagtgctggttcatccttcttcccctccaccctcctctaagcctcccagcttccccttttcttttctttttttttttttttagacggagtttttgctcttaccgcccagggtggagtgcaatggcgcaatcttgactcactgcaacctctgcttcccggttcaagcgattctcctgcctcagcctaccaagtagctgggattacaggtgcccgccatatcacccggctaattttttttttttttagtggagatggggtttcaccacgttggccaggcttgtttcgaactcctgacttcaggtgatctgcccgcctcggcctcccaaagtgctgggattacagaagtgagccactgcgcccagccccagcttccccttttctagagagtcccagagtttggtgttggacaggagaggacaaggtgggggagaatctgtgctctgcaaaacagacgaacggaagtaggaagctgggctggtggctgggcacttgggtcctttggagagctggcactgggtatccgcgcctggggcgccacagcctctttatactgataagcatcttacagctctctcccggcactgatgcctttctctcctgcaggtctctgtctgagaaagggacttgagtaaagttagaaactggcaacagtaacttcctgtatctgtgaggacaggaggagaaaggctagggaaactggagggggaattcccttgggaagccacgagttggtctcctccagagacacatgatggcaaacataatcactactgcttaatatcccgccccaggcaaagtcaataattgctctgggtagttcgagcaggtggtgtgagcaagccgtggtggcatcagaaagcacagtcctgggaaggggacggtgccggggaggatgtccgcatcctgaaggagagctggctgcgcgggctgtgagtgagacctccctgaccccgcccttttttgttcccctccaggatgctgccggactggaagagctccttgatcctcatggcttacatcatcatcttcctcactggcctccctgccaacctcctggccctgcgggcctttgtggggcggatccgccagccccagcctgcacctgtgcacatcctcctgctgagcctgacgctggccgacctcctcctgctgctgctgctgcccttcaagatcatcgaggctgcgtcgaacttccgctggtacctgcccaaggtcgtctgcgccctcacgagttttggcttctacagcagcatctactgcagcacgtggctcctggcgggcatcagcatcgagcgctacctgggagtggctttccccgtgcagtacaagctctcccgccggcctctgtatggagtgattgcagctctggtggcctgggttatgtcctttggtcactgcaccatcgtgatcatcgttcaatacttgaacacgactgagcaggtcagaagtggcaatgaaattacctgctacgagaacttcaccgataaccagttggacgtggtgctgcccgtgcggctggagctgtgcctggtgctcttcttcatccccatggcagtcaccatcttctgctactggcgttttgtgtggatcatgctctcccagccccttgtgggggcccagaggcggcgccgagccgtggggctggctgtggtgacgctgctcaatttcctggtgtgcttcggaccttacaacgtgtcccacctggtggggtatcaccagagaaaaagcccctggtggcggtcaatagccgtggtgttcagttcactcaacgccagtctggaccccctgctcttctatttctcttcttcagtggtgcgcagggcatttgggagagggctgcaggtgctgcggaatcagggctcctccctgttgggacgcagaggcaaagacacagcagaggggacaaatgaggacaggggtgtgggtcaaggagaagggatgccaagttcggacttcactacagagtagcagtttccctggaccttcagaggtcgcctgggttacacaggagctgggaagcctgggagaggcggagcaggaaggctcccatccagattcagaaatccttagacccagcccaggactgcgactttgaaaaaaatgcctttcaccagcttggtatcccttcctgactgaattgtcctactcaaaggagcataagtcagagatgcacgaagaagtagttaggtatagaagcacctgccgggtgtggtggctcatgcctataatcccagaactttgggaggctgaggcaggtggatcacttgaggtcgggagattgagaacatcctggtcaacatgggaaaaccccgtctctactaaaaatacaaaaaaattagctgggcatggtggcacatgcctataatcccagctactctggaggctgaggcaggagaatccttgaacccgggagttggaggttgcagtgagctgagatcacgccactgcactccagcctagcgacagagcaagactccatttaaaaaaaaaaaaaaaaaaaaaaagaagcaccttcaggctggagaagcagcgtagctaacacaagtccagtccttgtgatgtggctggtagttggggatggccaggctgaagcagagagtcctagagaaatctcgatacaagcttcaaagcaacacctagacactgctctagcggttgatcctggagataaaccaacaagagagagatggaagagaaatactaaatgaggtcaaagaagactcagaaaggttctgagcctggagatgagcagggaggcctcagggcttagacctttaatgataggggtttccctgcattggtttgacctgttgcctttttgatgtgctctgtttgttttcatgtgttgtcttgtctcccctgctaaactgggagctgccaggggtctgggtcttatctccttcctccatggtaccccacacaggccaggatgtggtttggtacccagcaatcagagattggcactccctcatacaggggaaagcaacctggtctagcaaattgaaaataaagatgataaaactctgaagtgaatgtccacaatttttgtaacactgctgcaagcacagggagggcaaaaataggagagagaaccagattcagcagcaaaggggaaaagtgatgcatctgaaaccacagaaacatcttaagataaagaggtggtgtgggcaaaggaagtgagagcactgacggaatcgtctttcgagggatgaatagagagtccggacttagaaaggatgcagggtgattccgattcacagtcatctgtctgccacagggccttaaaacatgtcaccctcctgctcagaaacctgcagagctttcctatcatcaaaatgtttccttggccagttgcaggggctcatgactgtaatcccagcactttgggaggctgaggtgggaggatcacttgagcccaggagttggagacccacctgggcaacacagtgagaccctgtctctcaattttaaaaatttaatttaaaaagatgcgtccggctgggcacagtggctcatgcctgtaatcccagcagtttgggaggccaaggcgggaggatcgcctgaggtcagaagttctagaccagcctggctaacatggtaaaaccccatctctactaaaaagacaaaaaaaattagccgggcatggtggtgcgtgcctgtaatcccagctactgaggaggctgaggcaggagaatcacttgaacctgggaggcagaggttgcagtgagccgagattgcgccactgcactccagcctgggcaacagagcgagactctgtctccaaaaaaaaaaaaaaaagtgcttcccccaaggaactcatattgtaccattcttttccttgctttgtcctctctctccccttccagttctacctgcctagctcatttttccacaataaggactcctagaccattctctctagttaaatgacctccagcccctaacctagtagtttgcaacccaggctgtacatcagaattacatgtggaggtgtgaaaataatacagagagccacctccaacctactgacagaatctctgcaggtggggccccagcaagagagcttttcaaaaaagcaccccaggtggccagctggggtcgcgaatcgctgtcttatctcagaagccaaatctgtccaagaacttgttcttcaaaaaccttgcctgcttattcatcccccctcacctcaatcccacattcttctacctgtttttttgttggtttgtttgtttttagagttggggtctcactctgttgcccaagctggagtgcagtggcacaatcatggctcactgcaacctcgaactcctgggctcaagtcaccctcccgcctcagcctcccaagtagatgggactacaggtgtacaccaccacactcagctaattattttattttattttgtgtagagatggggtgttgcccagactggtcttgaactcctggcctcaagtgattctcctgccttggcctcccaaagtgttgggattacagatgtgagccaccacacctggccctcccccatcttctggtgcttgcctcttcttcacttacaaaaatccactcaatattcactttctccagaaaacctttccttattagtcccactgaactgaaagctcattttctattttcctccttcaaaagaagactggacaggtgccataagaaccctgaattcagtgtccattccacttactaaatggatggcctgaagcaagccacctcctccagcctctatttctaaatcatagtgattaggatactacatacctcccaagattattctgtggattaaaataagactctatgaataaaattgctgagaaatcatagaatattaagtagttctaagatataaatccatgtacacagatgtaccctcacttattagaaatataataagtaaacattaaaaatagtggaaataatgctgggcatggtggctcatgcctgtaatcccagcactttgggaggccgagatgggcagatcacttgagatcaggagttcaagatcagcctagccaacatggtgaaatcccatctctactaaaaatacaaaaaattagccaggcacggtggcaggcacctgtaatcccagctactcgggaggctgaggcatgggaatcgcttgaacctggaaggcagaggttgcagtgagctgagaacgtgccactgcactccagcctaggcaacagagagagaatgtctcaaaaaaaaaaaaaaatagaaataacatagtaggtagtcaactacggatagcatggcagtaatatgttttaaaaaatctgggattctcagctgactgtacatgcactatgagtctgtgatgtattacagctgccacaaaagct[131 bp omitted]cggtgaaaccccatctctactaaaaatacaaaaaattagctgggcatggtggcgtatgcctgtaatcccagctgtttgggaggctgaggcaggagaattgcttgaacccgggaggcggaggttgcagtgagccgagatcacgccattgcactccagcctgggcgacaagagcaaaactctgtctcaaaaataaaaagaaaagaaataatgtctagacaagttgatgatactgaggcagagcaggtgtgctaagtggggcttggcccatgagggttcttggttttgcccaggaaagaattcaagggctagccggtggtgaaagaaaacagctttgttgaagcagccctgttacagctccagccctgttgcagctccgtgactgctcctgcagagcagggctaccccacaggcagagagtagcagctcagggcagttttgcagtcatatttttgcctacttttaattgcacacaaattaaggggcagttaacacagaaatttctaaggaaagggtagtaacttttgggttgtcaggtcattgccatggaaaggggtggtaatgcccaggtgttgccatggccacagtaaacatggcactctggcgggcatgctttatgaaaagctgcttcaccctttccttgttttagctagtcctcaatttggtccaatgtccaaacaccacccctggggtcaagtccctcctcctacctccataacccccattccacttaggtctaatcagcagcaggttcagaactgagcaacacattctcttgtattttttttttttttttttttgagatggagtttcactctgtcacccaggctggagtgcagtcgcacaatctcagctcactgcaacctccacttcccaggttcaagcaattctcctgcctcagcctcccgagtagctgggattacaggtgcatgccaccacgcctggctaatttttgtatttttagtagagacggggtttcgctatgttgtccaggctggtcttgaactcctgacttcaagtgatccacccgcctcggcctcctaaagtgctgggattacaggcgtgagtcactacat[140 bp omitted]gtgaaaccccgtctctactaaaaatacaaaaaattagccgggcgtggtggcaggcgcctgtaatcccagctactcgggaggctgaggcaggagaattgcttgaacccgggaggcggaggttgcagtgagccgagatcgtgccactgcactccagcctgggcggcaacaagagcaaaactctgtttcaaaaaaaaaaaaaaggacactagctcaatgaatcaagcccagaaaaattaaccaaaatgttttggagatttaagactgtataacaatagtaatagccgtaataatagagcaaattaaataccaggcactgtgccaagaaggggcctgagagggttaaggtcacttttcaaggccaataggtggcagggagtttgaatccaggtctttctgagcctaaagtgcatgctgttttcactgacacatgagaaggaagtaagagaacactggctgggacaagataagatctttttttttttttttttttgaggcagagtctcgctctgttgcccaggctggagtacagtggtgcaatcttggctcactgcaacctccacttcccaggttcaagcaattctcatgcctcagcctcctgagtagctgggattacaggcgtccaccaccatccctggctagaagatacactctatgagccacacaggacagaacaaagaccacaggtggaagaggcacagagatacctttcaaatagttatggccatttcaatggaactgactatctcagcaaagaagtcactccccaatttccaggaatattcaagaaggtagcaaacatctatcctaggacactgaggaaactcacacaaatgagggctgaaccagtttaatgaccacttccaactctacgattcccaggttcttttttcttttccttttttttttttttttttttttgagatggagtcttgctctatcactcaggctggagtgcaatggcgggagtgcaatggcacgatctcggctcactgcaacctctacctccgaggttcaagcgattctcctgcctcggcctcctgagcagctgggactacaggtgtgcaccaccaagcccagctaatttttatattttcagtagagatgtggctcatgcctgtaatcccagcactttgggaggccgaggtgggcagattgtctgaggtcaggagtttgagacaagcctggccaacatggtgattctcaggttctttaggggcacgacttctcttactaaccaggaaagtacaaaatgaagtcattttgctgggcacggtggctcacacctgtaatcccagcactttgggagtccaaggcaggcagatcataaggtcaggagttcgagaccagcctgaccaacacagtgaaaccccatctctactaaaaatacaaaaattagccagttgtggtggcacgcgcctgtaatcccagctactcgggaggctgaggcaggagaatcgcttgaacccgggagtcggaggttgcagtgagccgagattgcaccactgcactccagcctgagtgacagagcgagactccgtataaaaaaaaaaaagagtcattttgttgtcatggggttataagaagatcgatcactggacctggtctaagactttcaaagtgaagctgtagctgctcacttacaagcatttgaccttcatcaagttacctgacatagcagcccatttcttcactgggaaatcagtcgatcacctgttcaacaaatatgtattcattaccaactccaggccagatacttttctagggtctagggatacagagcgtacaaaagacaagtatcttccctgttgggacttccattctggtaggggaacatagtttaaaaacaggtaaacaaatagatgagcaaggtgatttcagagtgtggcaaatggaaagtagttacaaaggaactgaaacaaggtcatgggagaaactataaggggaggttgaggaggtttagaagatcattctactctcttgcttcaaaccttcacctggcttccagaagctcttagaagctcattcaaactccttttagtgacctaaaatactttgcacggtcggtcttttcaggcagctgctagcccgatgaaaaccctgcgtgtttgcatagaagtctatggtttcttaactctcatgcacatggtctccttgatcctaacaaacattccccttcaggtcccttcaggtaggcacagctgccagaatgatattcttaaaatggaaatcagatcattccaatatcttgcttcaaatcctcgaatgacttctagaggctcttagaatacaaattcctttctgtgacctggaagcccctgctcagctcctcaacctcatcttctttcactctgtccccattgatagtattccagcccagaggttctcaatatgtggcctctgagccagcagctgctgcatcacctgggaacaagccacttgacacatcggcctgtttcttcatttggaagttgaatctcctaagttagtgatgttcagctgagccctgaacaatgaaagggagttgacatacaaaggcccgcaggaacattctggaaacagaaattgctgatgcaaaggctctgaggagagagaaaaccttagcatctctcaaggccagagagaaggccagtgaagggctcaaacaggggttttaaatgtaagcaaatattggaactacctgaagcgtttgctgaaccatagatgactgtcctcacttccccaggacttcagaatcagtagggatattggtcagggttctccagaaaacagaaccgagaggacagacagattacatagacagataagtagataggtagacagataatagattagagagatagagaaagagagagagagacagagacagagagataaagatacacaggtaggtagtaggtagacagataatagattagatagatagatagatagacagatagagatagatagatatacacaggtagctagtaggtagacagataatagattagatagatagatatgcacaggtaggtagtaggtagacagataacagagtagatagatgatagatagacagatagatagatgatagatagatagatagatatacacaggtaggtagtaggtagacagataatagattagatagatagatagatagatagatagatagatagatagatagatagatgatagatagatgggggaagggtaggaagccctgatctattgcatttgcaaatttctgtggcacatacactcccaccaggaatcattgctaccaatatgaagatcttgaacatgggtttggcaagagatgctaataatgggctcttattataatgtaatgagctcagacatatccctgcatgcaactcacagtacatctgctcaaatggcagccagatcacatcttccttgagaaaactttctctttccccaccaacgcttcatgcaagcctcttgcacagtgcttcctatacagtaaacactagttaaatgtggctggctgggcctgctccaaagcatccgggtggctgtatgattgcacagctcctctgaaccccctgccccaaagcaggatgacagatgggtaaacagaaatattagtgcctggttaatgaataacacagacggcagcctagtgccgctaccaggaaacaggggtggagggatctgacctggcccaacctgggggcctgagcagcacgaaaagggaacctggcattatttcacttcccctttctggaaaagatgctcctgggccccttcctcagaacttctcatcagtccgcacaaccagagctcaggtgcagtgtggcttggtgatgaatactatggttggaaaaggagggatgggggcagtgggcatggagagggtctggaggaaacacacagccatgattccagcctcactcccttaaacgtcctgcctctcagcgcggggtctgtgctagttcttcttttcgccttgccctgcctcctgtggataagtgcttttgccccacttttttttttccttttcattatttatctctaatcacaggaaatgaggacatttctcatctacaaattgcacatcccatcaggaaattgggccaaagatctctaagccttcagaagcggtcatccagtaacccacttggcaaagtttcaaaggtctgggaaagtagatgcgaggtcaagcagtgcgggaggggagccaactctgcaaacgctggccacggccagctggccaccagcagcttacccgaggaggggttgtccaagctacatactaaccccggttccctctccccaaacattgtcctctgccatctgtcagtccgagctacgaccagcctcgagaaaacagagttaggaaagtaaacacactgctcccaaatctagctattttaaataaaaagctcacccatgtgggctgcagttgagaatttctaaagtgccatggcaaacattacaccatttgagtttccacggcgtagccttcattcatccgccaacatttatggaggcctaccatgtgtcaggccctgttttaggtgctaaggatacagcagtgaacaaaaagggtaagattcctgccctcaagcagctcccattgctgggcagacagggagagcaagacccataagcaggatcctttgcactggtgctacgtgctgtgaagacgatagaaccgagctgggatagaacatgactcccaggaagggagtaggtggttacttttgaacacacagcttgagcttgagaaggccatgcaaaggtgatatttgagctgggactagaatggcaaggaggaatcttgtatgccaagaactgggggaataatgtcccaagcaaggggctccaggcctgtgcgaggcctgaacaggctgaatttgtgccgggaaaagaaacgccagggtggctgcagcttagtgacagctgaaaagccagcaagt[144 bp omitted]aaaaccccgtctctactaaaaatacaaaaaaattagccaggcgtggtggcacacacctataatcccagctactcaggggcaggagaatcacttgaacccgggaggcagaggttgcagtaagatgagatcgcaccactgtactccagtcttgcaacagagagagactccaaatcaaaaaaaaaaaaaaaagaagaagcgcaacagatatcctctccctacttaacaacaagaaaagctgaggctcagcgatgcaaagtggcaaagtggcaaagtgacacacgcaagtcctcagtgagatggtgttctggcccctcctccacgattcccgactccctctcaaaaccacaggcacactctctctcaatctttacttcactgaggaagagaaaagagggcaggaatcgtgactcatgcggtgtgcagttgtttggtatagaaagttggggagagtgatggagactgacctccatcgaggttctgagaaaggaaaggcatcgggggtggggtaagatgcctggtgctgagagcagagtagagaccagcaagaaacctggcttctaggaggagtcgtggctggggagaagaaggggcctgggctccaagaaagtgatgggaggccaaggagtcaccaagagccgtcccatgttgtcccgggtccactggcctgcaacagaaatgaaggtgtgaggacagaagcatagagctcgggggatgcgagcaggcctccagcctgcgtccacttctcaaccctggctgcgctccaaagccactggaggagtttccaaaactgccggtgtgtttgggcattgtattttctaaagctctccagttgcttgtgaagtagagtgagggttgagaagcagtgaatttagtcctggtcctctaggggacaagctgagggctctccaggaaggggcagcagggtgtactgagtttgaatcctgtcctagcgctgtgcaactcaaccttgctgcgctttcgttttctcacgagaattttttttttttctttgagacggagtctcgctctgtcgcccaggctggagtagagtggcatcatctcagctcactgcaacctccgtctccccggttcaagcaattcttgtgcctcgccctcctaagtagctgggattacaggcatgcgccaccactcccagctaatttttgtatttttagtagagacgggctttcac[140 bp omitted]ggctcacacctgtaatcctaacaccttgggaggccaaggtagaaggatcacttgagaccaggtgtttgagaccagcctgggcaacagagtaagaccccatctctaaataaataaataaataaataaataaataaataaataaataaataaataaatatagttgattttaaaaaagaaaaagaaaaaaatgaaattattaaataaaataaattagccaggcatggtggcacacacctgtagtcccagctacttgggaggctgaggagggaggactgttggaacccaggaggtggaggctgcagtgagccactgtactccagcctgaatgacagagtgagaccctgacccaaaaaatatataagtaagaaataaaagaagaaaaaaatagggctaacagcacctacatcatcatgttattatgaggatgaaacgaatttcatattgtacctccaaagcacttagaaaagtgtctcgcactggagatgccaaatacatgtttaaccatggaaatgttttaaaactgtaattccattcttctgctcgaaggcctccagatacttctcatgatcctcagagtaaaatcccatgccttccccaaagccagcaaggcccctgatgcatctagcacttggctctcacccaacccagctcatccctactcccttcctccaagccctcctccagctcccttcactcttccttttttgttaccgacagctcactaagctccttctccttgtggttcccttttcgtggagccctcgttccccaggtactcatccagctgaatttcccctctttgaggctgcctgtgactcaaattttatttcctcaaaggacttccccctccaccactcctaagtggcttcccttttgacacattcacataatacctagttgctgacttcgctgggtgtatcattagctgatagcatctatttttgtctacttgttatttttatccgttagacttgcacatcccttaatgcatcaaatggttgactgtgaaaaacaacttccttcccctctctctccaccacagtcacttaccgcttcctggaggcagctgctgctacctcttgtcagcaaaatatttatccctccatgcctttaaggggcttgcttattttactgtatttcttcatttctcaatataaggtttcatctgttaaattattctgtggcagatgaagattatgctcttattcttttcccaatatgtacaacacccttcccgccctgtcttcccgatctgctcccattgtcactatgttagaaaatattcagtgtttgcataatcgtgactacatcgatgttaatgacattggagctctgtagtaaataacagctcctttttttttttttcttgagacagaatctcactctgtcacccaggctggagtgcagtggcacgatctcagctcactgcaacttccacctcccaggttcaagcaattctccctgcctaagcctcccgagtagctgggattacaggtgcccgccacctagcctgaataatttttatttttagtagagactgagtttcactgtgttagccaggatggtctcgatcttctgacctggtgatccgcctgcctcggcctcccaaagtgctgggattacaggtgtgagccaccgcgcccagccagttccttttttatcctgcacaactttcctcccaaaacccctggaattaataatcaccttattttttcatgtgtttagtctacatgtttaccacgaattcaaccccaaactctttgtcaatgttcttgtctcctctcaagaacttcaggggttttaggaggatacagatttcatctccctgaagaaatgtgtcttggaactttctgacctgttccagtctgcctgggtggtggtttatgccaggtgtatagctcatgcttgaagctcttttttttttcttttagatggagtctcgctctgttgcccaggctggagtgcagtggtttgatcttggctcactgcaacctctgcctcctgggttcaagcaattctgttgcctcagcttcccgagtagctgggattacaggtgcgtgccttcatgcccagctaatttttcttgtatttttagtagagacggggtttcaccatgttggtcttgaactcctggccccatgtgatccacccacctcggcctcccaaagtgctgggattacaggcattgagccaccgtgcccagccagctcacacctgaagctcttaagtggaaagcctctttgcttctctgctcttgtcttcctcttccttggtttacatccttaagcagcttctttatttactgctgggaataacgctccaaatcctaaggaaactgaacactcaaacaaaggattcttagccaagcaattttacttgcgcagaggggtgcttctccttggccagttgccatgagagcacacctgaacaaaggggcacgagagcctttattcctaatgcaagtcctgcccctgtaccctttccccattggccggagtcgggccatacaatctaaactagtcccagttggctaaacatttgaactttctttagataaggtgggcacgtaagggagagaggggaaaggggaaggggtgtctgcagtgagctagagagctagtcttctttccaaataaggaaaagaacgtgagctggtactaataacgcctggtactgtggcgtgtctgggcatggaacaaaggcagaaaggaaaaagaaggagcaaaaggaaaagggggtggggggatactatgaattaaagaataaaggattgatcggctatttgaagagaaacctcatcatagcccacatttacttattttattatttattaacttttttggagacagagtctcgctctgttgcccaggctggagtgtggtggtacaatcatggctcactgcggcctccatctcctgggcccagacaatcctcctgcccaatcccctaaaagcattgggatcacaggtgtcaccacacctggctattttgtttgttcgtttatagaaaggggagggtctcactatcctgcccagggctggtctcaaactcctgggctcaagtcatccttctgcctcggcctcccaaattgctgggattacaggcatgagccaccatgcccaaccctgacgcagcttctttagaaagtaaatgctttgaaatcccgcatgtcagaaaatgtctttatcccactctcatgtgtagttgatattgggctatgtatggaatattctgggttggcaatcattcttcttcagaacttgaaaggcattgccgcattgccttctagcgtccagtctggctgaaaattcccaagacatcctgactcctatcctttgtccatggcctgtctttttctctctggaagcctgcaggatccttacctttctcacaaggtatctaaaattccatccattgggcattcaatggactcttccagtctacaaaataatttccttccatttgggaagattctcttgaaacactttgtgatggtttccttgccttcattttctctcttctctccttctggaatccttgttatttgggggacactgcacctcttacacggccctctaattttcccttttttcccattttttctctccccattgttttgctttactttctgtgagattttcttatcttccagcccttctatttttcatttttgctatcacttttcatttctgagcacatttttattccttcttagcatgctgaccttgtttcatgattgcaatgtccactctgatttctctgaggaatcttcatctccctgctctaagatgccttttttggtgtcagttgctatattttatgttagaagttgtcatcatatatatggtaattcttggttgtctgctcacattgaagagaagggaagggactacttttttttagatacataaaacgtatataaaggcactatgacatgatgtctaaaccagaaaagaatggttgagtgccatggctcacacctgtaatctcagcactttgggaggccaaagctgaaggattgcttgagcccaggagatccatactagtctgggcaacatagtgagaccctgtatctaaaaaaaaaaaaaaattttttttttttttgagagggagttttgctcttgttgcccaggatggagggcaatgacgacgcgatctcggctcaccgcaacctccgcctcccgggttcaagcgatctcctgccttaacctcccaagtagctgggattacaggcatgcaccaccatgcccagctaattttgtatttttagtagagatggggtttctccatg[136 bp omitted]agtggtgcctgcctactcagcagtcccagctactcgggaggctgaggcaggaggatcacttagcccaggaggtcaaggctgcagtgagctatgatcacaccactgcactccagcctgggcaacaaagcaagatgctgtctctaagaataataagattttcagcctattttccttatgttagcttgtcctttgtcccatttccagaggaacctgttgccactagttcatgagctttatgtggattctacagtagaaacttcattgaatcttggtttttcccactattggcttatgatccaactttcacaggtctgctaagtcagtcaccagttaccattcattcatctgctgtccagctggcaaaattttggtggtattgtatcctcttatgttctccctgtacttacggggactcctttctaaaagatctctttactgtcactacagtgtgatttcaggaggcagcaaaaggagattcatggatttcacccaccgttattagccccaagtatttcctctttattgttattgtttgtttgcctgctaattgtctgtcttcccctcttgaatgtaagttccaggataactcatctactttggttattttgcttaggtttttgtttctttttttctttttttctttttttgagacgtagtttcactcttgtcacccaggctggagtgcaatggcatgatctcggctcactgcaacctccgcctcctgggttcaagcaattctcctgcctcagcctcctgaatagctgggattgcaggggtccgccaccacacctgggtaatttttgtatttttaatagaggcggggttcgccatgt[136 bp omitted]cccaggcaggaatgcaatgtcgcaatcacggctcactgcagctgcaaactcctgggcttaagtgatcctcctgcctgcctcaacctctcaagtagctgggtctattggtgcacaccatcaagcctggcttttttttttttttttttttttttttggtagagacagggtcatgctatgttgctcaggctagtctcgaacccctgcctgacctcaagtaatccttccatctcagcctcccaaagtgctgggatcgtagacctgagccactatgcccggccccattttgtacacctatccatccccagcagtcagaaccatgtttgacacagagtcagtgttaaacaaatgaatgaaccaatttgctagcaaaagaaacgtactactcgccatcagggaggtggtagcagactcaggtctcctaactttccgggcagtgtccttcctaccacagcatggttggggtatgggtaattttgctaattaatgatatcagacagattataaagtgcttcacctggtaccaaatggtttcagaaatcttatctcatttgatcctgacaacagcccatgggccagatggtaaaagaattattattggccctaatatagcaatgatccctgacaggaactatcctgtaccatagaaatcaccgtcgctgctcctgacctctcacccatgtccactgtcatttatctgggcccttccatcacctcctctgcagacaggactgttaaggcttgtcacctctcaagcacttggtccccaagaatccaggactagctccttcataaagagggaaacgggtacagacaggggtaagtcatataaggtccttggagcaaagaagacatctgagttttgtgatgttacaggagcagaaaaaagaagaaaagtggaactgtcagatcagtagcaccttagagaagagctggatggagaaggaaggagaaggggcttagatcctggaaggagagagaataagtcccagaactaagagcggtatgtatacggtggggagagaggtgggatgaaaataaccatttaccataaccatagattccctttttttaaaatgaaatgaaaaatatcctagaatataatcacaaagccagttaaaaaatattctacacaggccgggcgggatggctcatgcctgtgatcccagcactttgggaggccgaggcgggagaaccgcccgagctcagaagcttcacatggcaaaaccccatctctaccaaaaaatacaaaatattagccaggtgtggtggcgagcctgtggtcccagctactcgggaggctaaggtgggaggatcacttgagcctgggaggcggaggttgcagtgagccaagattgtgccactgcactccaacctgggtgacagtgacaccctgtctcaccaaaaataaaaataaaaaattctggacagcaggttctgtaaaaccataacattagctcctgggatctgcttagtttctggatagcctgaactctgccctaagaccccagggaaaagtgaaagtaggatgcatggccccttccagggaagcaagatgtgactcaaaagtcacaccaggtcccaagggtataggtcacagagataaaggctgtaaagcaccccacactttctcattgtgctacctgccatcctcctcagattctgcctgccacctcctgggcagataaggctactacccgcctgcaaaccctggcaggtccaagcaccactcaggctgctgtgcctctgtgatccacacccagacactggaaatcgcccagaagcagaaacttagggatgaggaagttggcaagggggggtcttttaaccttgcattaaatcaagatgagtctttgttttttgtttttttgagacagagtcttgctctgttgcccaggctggagtgcaacggcacaatctcggctcactgcaacctctgcctcccaggttcaagagattctcctgcctcagcctaccaagtagctaggattacaggtgcccaccaccacacccagctcatttttgtatttttagtagagacagcgtttcaccatgttggccaggctggtctcaaactcctgagctcaagtgatccaccctcctctgcctcccaaagtgctggaattacaggtgtgagccaccgtgcccggccttcagtatgagtcttggtacggaaagaggtctgaaacatcttatgaagctacaatagcagttgtagaagagaataaataaaacagtactgtctataatcttaaaatcagtatagttatgtgtcacttaacaatggggatatgttctgacaaatacaggcaattttgtcgttatgcaaacatcacagagtgtacttacacacacctagatgggatggcctactgcacacctaggctataatggtatggcctattgctcctatgctacaaaccatggtactgtactgaatattgcaggcaactggagcacaacagtatttgtgtatctcaacatagaaaaggtaatgcattgtgctatgatgttacagcagctacaatgtcagtaggtgacaggaatttttcagctccattctaatcatatgggaccaccattgtatatatacgcagtctgtcaatgaccagaacgttgttatgtggtgcatgactatatatatatataataatagcagctgagtgtttttgagaccttcatacatgtgagcacagagctaacctctctgcatgcaccgttcaatgaattcttaccaaagcacagggacataggtattgccatgacttttctttttacaaaaagggaaattggccaggcacatggctcatgcctgtaatcccaacacttggggaggatcactcgagcccaggagttcaagaccagcttgggcaacatggtgaaaccctgtctctacaaaatataaaaaagattagccaggcatggtggcatgtacctgtggtcccagctactcagaagactaaggtgggaggatggaggctacagcgagttgagatcgagtcactgcactccagcctgggcaacagactgagactttgtctccaaaaaacaaaacaaacaaacaaaaaaaaggaactgagacttagagcgattgtggaataacttgtcctatatctcacagcaaataagtggcagggcaggactagaacctggatctgtatgactccggagtctgaattctcagcctctgctaggaaagcatggatgtgtacacatgtacgtgaaattcgcaaaggctacgtgacagtcaacaatggttacttaggaaattgggaggagggaaggtaggtcaactttctttcttttttttttcattaaaaaatttgttttttagtgacagagtgagactgtcactaaaaaacagtctggagtgcagtggcacaatcataccttactgcagcctggaactcttgacctcaagcaattgttttgcctcagcctcccaaaatgctgggattacaggcatgagccactgcacccggcctcattttctgctttacataattctgtactgtttacatttttcccatgagcatatattatttcataataaacacataaagcctggttttaagttgattctgctgaggactaagctctgattttttatcctgcccaaattcctatctaaggggcccagagaatcgtgccctaaaaaccataaattctcatcagttgggttttatttaaccctatatatcgtgacttactttccagtcttactgtggcataacgttacttgataaagaagaaagtcaaaatattttactccaaaatcatattttgaagtggccctgcaaagctgtcctttgtggggaaaatttgcatctgtaaagaatctctatcaacatagctagatctttttcttccaggccctcccaatcctgaagagattaactaagagtctagcaccttttaaagatctgaataggaaacatttgtcatctattgtctctaagggcagccactgtaagacttcaaaagaaccttggtctccacaatcttttaacctgaacatatcctttctgtcaatcccaggtctttagacaaactcaatcaattgtcaaccagcaaatgtttaaatttacctatagcctggaagccctgccccactttgaattgtcccatctttctggaccaaaccaattaatttcttaaatgtatttgaggccaggcattgtggctcacgcctgtaatcccagcactttgcgaggccaaggcgggcagatcacgaggtcaggagattgagatcatcctggctaacatggcaaaaccccgtctctactaaaaatacaaaaaaaaaaaattagccaggtgtggtggcgggcgcctgtagtcccaactattcgggacgctggggcaggagaatggcgtgaacctaggaggcgaggcttgcagtgagccgagatcgcgccactgcactccagcccgggggacagagcgagactccgtctcaaaagaaaaaaaaaatgtatttgattgatgtttcatgcctacctaaaattataaaaccaagctgcaccctgaccaccttgggcaaatgttctcaggacctcctgggggctgtgtcacggggccatggtcactcataataaatctcttcaaaatattttacagtttgactcttttcatcaacactgttcaccaaacatacacagagaagaaaactcaaattactctagcgtttaggtcctgttaactgaccaactactgtgagctacactgagggctaagcacttcacgtccaggacgtcactgaatcctcacaactgggtctggagggagggtattttcattaactcccttcacagaggaggaccctgaggctcaggaatgtgaagtgacctccctaaggtcacataacaacttaggaactcaacttaggcctgactggttcctgagcccatgcgtgtagctacatcagtatgttagcggcgcaggaatgatgacaatgataataacagcagtttacgtgcttgctatgtggcagccctgtgcatttcatgtataatctcatcacatctccatggcaatccccgttttacagaagaggaaactgagcgtcagcagagagaagtcacttgtttgcccagggtcatccagcagaattgagactagaacccaaaccaccggcatccatccagtggctcaggccaaaatctcagtagccatccttgactcctccttcttcttcctccatatctaatccattggttctagttggcttcagttttcaaaatacatgttcacttctcactatctgactactgcaggccccatggaagccaccgccgtctctcttccaggccagtttgaaagacttcctactgaacgccctccctccattcctgcctcttgcccccaccccatccactctctacattgcagtcagagtgatctttttcaactcttttgctaaatatctctcctgcaacctttcttagggttttgggagacaattaagctctgcagagaatggtttgagtgattgttttcttgattttcccaaggatgctactagctaataccattacttactacagtaggagataacttaattcattacatgcaatggatgccttagagtcttagggcttaagtctaccgggaactgggtggagacagctgcaaaagtttcctgtcacatttcaaataccagtgaccatggcctacaaggcccctgtgacctgccacccaccacaccttgacctctgcaggtacatttccaactacccttttcccaagcacaagacctcttctccctacctcaatcatagaagtctcattgctgccttagagcttttgcaggggttgttcccacaaccttgagccctgcccaagccatccagagcctgctccttttgtcagtcattcagggctcagttcaaagaccaccagctcagaggggccctctcggccacctgaattaaatgctgccaattcctgctgttttatttcctttatggcacttatttatcataatctgaaagtacctttgcttgttcactcaactgttgtgtgtctcccaagttaaggctgagctccatggggcagaaaccttttcacagggaagcaatctgtaaaaatatgtttagagaatccatcagatatctattatgagccagtcactgggttaggagctttgcaatgaatcctttttatcaaccccaacattgtccaatagatatacaatataagccaaggccaggcacagtggctcatgcctgtaatcccagcaatttgggaggttgaggcaagaatgacccttgaggtcaccagttcgagatcagcctggacaacatagcaagactctgtctctacaaaaattaaaaggggccgggggtggtggctcacgcctgtaatcccagcaatctgggaggccaaagcaggtggatcacctgaagtcaggagtttgagaccagcctgaccaacatggtgaaaccccatctttactaaaaatacaaacattagctgggcgtggtggctggcgctcgtaatctcagctactcaggaggctgagacaggagaatcacttgaacccaggaggtggaggttacagtgagcagagatggtaccattgcactccagcctgggtgtcaagagcgaaactctgtctcaaaaaaataaaaaaaaataaaataactttaaaaaattaaaagaaagaaatgtaatgtaagctattttttaaaaaatccaagcctcttggattcaagcgattctcctgcctcagcctcccgagtagctccaggcaccatttaaaaatttttaattgtctaataatcaaattaaaagaagtaaaaagaaacagacgaaattaatatattttatttaaaccaacatgttcagaggattatcatcccaacatgtaattggttaataaagatatgaatagatgacagatggatggattggggtgtgtatgtgtgcatgtgagctcctcctctataccttttctgggttctgagaagctcagcggcttcgtcgctattcggggactcacgggcttgcccttcaagacccagcctcaaagccccagacactgcatctctgctttcccgccttttctgtacctgtctccatgtggtgctcccttcagggcctgcacacagggaagggagggccgtcctcccgcgaggcctcaaggtgcctatcggtgcagtggctcaaacaaaacaggtgtgacaaaaggccaggaatgcctcccaggggctgaggcacctcagggagcgtgttagaagaagtggacggtaaaaagagagcgtccgggccaggagcggtggctcatgcctgtaatcccaacactttgggaggccgaggtgagtggatcacttgaggtcaggagttcgagaccagcctgaccaacatggaaaaaccctgtctctactaaaaatacaaaattagccgggcatggtggtgcatgcctgtaatcccagctactcaggaggctgaggcaggagaatcgcttgaacccgggagttgagattgcaccattgcactccagcctgggcaacaagagtgaaattccatctcaaaaaaaaaaaagagcgtccagaaccaggacgcatgcgcacattagccccgactggaagtgcatgaggacagaagggaagcagaagttggggctgaggtgttcctgctgagaagagtgatggatgtaaattttgaagctctggatcctgcccacaccatggagccaagaggaccagaggagtcagcattgaactggaaatcaagttggaactgaaaattgacttatccacaaatagtaagaactgtgaatttgggcctcaaggagaggaaattttattcctaggcagggtcttcttgggaaggcagccggacaaggcttctctgaagtccagtaaggttttgggaggtttcattgagaaactgaatactgagaatgaaatgctgagaaatgaacagatgcaacagcaaaattttttccaaaaattgtgctgtgttctaaatatttacattgaatgaatgatacaaaaatatactcaggtcaatacagttgtgcagatgatcggatttataagaaataacgaggtgacctgttaatgagagataatttttttttttttgagatggcgtcttgctctgtcgcccacactggagtgtagtggcacgatctcggctcactgcaacctccgcctcttggattcaagcgattctcctatctcagcctcctgagtagctccaggcacgtgccaccatgccgagctaatttttgtgtttttagtagagacagggtttcctcatgttggccaggctggtgtcgaactcctgacctcaggtgatccacccacctcggcctcccgaagtgctggcattacaggtgcgagccactgcacctggccaatgagacacagtttttaagttgtacagtgaatgacacttcgtggtcccaatccagttagcctacctctgtgactctgaaaaatctcatctcgagataacttaaggagtgaaaattgaaagtcttcctagtttctgcccctattggagaggggccccagatgttctgttaggaattagtaagcaggatgaccctgagaataagccacaagaggaatctgtgataactggacgtcctgagagattttctcatcagatcaccagtgctggagggacatccaggctccatccctgatgctacattgggaatgagtgatgaggggtgctctgtatggggagtgaggtttttcataatgtgcgagggtttctggctagaacaacaaataaaacaagattacgttgaataatcagactggcaaggcctcttggaggaggtgtcattgccacagagacctggatgaagtgagggagcaagggaagaagggaatgagtcatgcaggcagagggaacgtggccttttgaagagcccttgaggaggctggaatggggtgcagagggctggagcaaagtgatcaagatgggagggggaggtaggagatgaagcccatagtaaaatctatggggttttattacgaagtaatgggaaatcatgggagggtagagagtagagaatagagggagagcatgaactgatttaacataaaaagggctttcggggaggggtgatagaggctcagtaggaggctaaatacaaaagcggtcacttgctgtagggggcgctaaggagcattacctcaggtcaccagcctgggaagtagactcaggtgcaggtgagggaaatgaggcatctttccatgggagagccatggggatttttgtttgtttgggttgtcattgatttaggggaggagaacccaggaatgttgtggtcagttggtctgttgggtgtcagaaaatgtagtgggaggtcttaatgggatgatagtcatcaagggcggggtgctgtgttcatttctcaggagcatctgaggccatttcaccctgttgaagttctcgggccgcctccacagtgccgccattgttggggtttgtaatgaagtaaatcaggctctcaggagggactatgtttaggaggtaacatgaagagcaccccgtcagccaccagaattctcaaccttgtccctcacagctgaatggctttggacagattgaagttaaggtgtctttattgtggttgccttaaaatattatgttaggctgggcatggtggctcactactataatcccaacactttggaaggctgaggcaggaggatgagttgagcccaggagttcaggaccagcctggacaacatagtgagaccccatctctacaaaaaattttaaaaattagtcaggcgtgttggcatgcacttgaagtcccagctacacagaaggctgaggcaggaggattgcttgagcccaggaggtcgaagctacagtgagctatgtttgtgtcactgcactctggcctgagtgacagtgtgagattcagtgtcaaaaataaataaaataaaatgttatgctatgaagtatttcaaacacacataaagatatgagaaaccatattaacaaactcctgtgtacacattcctcaattgttttttttttttaattatttaagacggagccttgctctgttgcccagactggagtgcagtggtgtaatctcggctcactgaaacctccgcctcctgggttcacaccattctcctacattagcctcctgagtagctgagattacagacacatgccaccacgcctggctaatttttgtatttttagtagagatagggttttaccatgttggtcaggctggtcttgaactcctgacctcttggtctgcccacctcagcctcccaaagtgctgggatttcagatgtgagccaccacacccggactgcgctcttattttattgctggacagctaccattccaccatgtggtccaccctattttacacatccattgttttttttttttgagacagagtctcgctctatcgcccaggctggagttcagtagcatgatcttggctctcagctcactgcaacctccaccgggttcaagcgattctcctgcctcagcctcctgagtagctgcgattacaggtgcctgccactacacccagctaattttttgtatttttagtagacacagggtttc[131 bp omitted]ttttaagccagggtctggttcagactggagtgtagtgttgccatcatagctcactgtagccttgaactccttgggctaagtgatcctctcacctcagcctcccaagtagctggggctacaagcatgcaccaccatgcctggctaattttttcatgattttttggagaaacaggggtctcactatcttgcagaggctggtcttgaactcttggcctcaaatgatccacctgccttggcctcccaaagcactaggattatagatgtgaaccactgcacccagccaacacaagaaactaaaatagttaaaaattctagggctctgaaatctaatagaacctgagttgaaagcctggctctgctatttcttctgtgggtgctcttaggaaagtcacttcatctttatgggcctcagtttcctcatctgtcagaagagagcaagtgaatacagttgcaaatattatttctctaagtatgactctatctgagtcattatctaagtggagttttatagcataataataacagctaccttttattaacatgaaaaaatctaggctaacatttactgaggttttctaaacccttgtgaagtattgctattattcccactttacaaatgatgaaactttggccctgacagagtagccacccagaggtcacgtagctagtaaagtggtaggaacagaatttgaaatcaggtctgactgattttataactcatattctaaccgctaagttgtaccaccttaaatgcctccagcggatacttagcagtggtttccaaacattttttaaggaatggaaacattttttttttcaagcaaagtcttaaatgaaacagtaggttataaagcaagtgaaggccaaattacaccagttaaagcagggataatgcaggtacgggttcaatcctggctctgccgggtcctggctgtgtgagcttgaacagattacagtctccgtcatcacttaatggtggagatacgttttgagaaatgaagaacagcagagtgcacttacacaaacctttatcgtatcgcctactccacacctaggctgtgtggtatagcttatggctcttaggctgcaaacctgcccagcatgtcactggactgaatgctgcaggcaactgtaacacaataagcatttgtgtttctaaacatagaaaaggtacagtacaaatatgatataatcttttgggaccactgttgtttatgccgtctgttgttgaccgaaacgtcattatacagagcatgactgtacttatctctctgagattcaatttctttgtttgtaatatggggataatgatgccaacctaataggtttgttttgcggatcaactgagataatatatgcaaagcacttggcataaagcctggcgcgtgataagaaccaaattaagaatggctgctattgaattgtggctgtggctgttaccaccttcgggactgtctttactgacgatgggattgagtggaaatttttcagccccccatcatctgacccaacctgcatttccaggcctccacgcctacgggatagcccggctgaatgacagcgttcccagtccagaatcccgcactaccagttcttcgtgctctgcccactggagggccctcttcccccctccctcctctaaaagcatactctggaaattttttgaatattttaagaaactgttattgtagaatatttcaaaatttgcaaaaataaaaagctagtataatgaacctcgttttttattaggtaattaccgaccttatttcttgtgtaccccaacctgttccccccactggattattttgaagcaaatcctaaagagtttattacttcagacatagatttatcattaggtatctgcaaggtaaagactcttttttaacataactacaataatattttcacatctaaaaatataatttctttttattttttttattgtttcttttttttaattttttttttagagacggaatctcactatgttgaccaggctggtcttgaactcttggactcaagcaatccacccacctcggcctcccaaatcaaagagctgagattacaggcgtgagccgccatgcccagaccaaagatgataatgtcttattatcaatatgtccgtgttcaggtttccttcgttgtctcctaaatctttttctctcccagttggtttgttcaaattaggatatagacaagattcatatgttgcatttaagtgatgggtcccttcaatcaacttttttttgagactgagtcttattctgtcacccaggctggcatgcagtggcacaatcttggctcactgcaacctctggctcccaggttcaagacattctcctgcctcatcctcccgaatagctggaaataacaggtgtgcacccccacgcccgactaatttttgtatttttagtagagacagggcttcaccatgtaggccaagctgattttgaactcttgacctcaggtgatccacccccctcggcctcctgaagtggtgggaatacaggtgtgagccaccatgcccggcctcatcaatttttatctttttttcccctttccctttttttctacagtggctttttttttttttggatggagtttcgctcttgttgcccaggctggagtgcaatggtgcaatctcggctcactgcaacctctgcctcctcctgggttcaagcaattctcctgcctcagcctcccaagtagctggaattacaggcatgtgccaccacacctggctaattttgtatttttagtagagacagggttgctccatgtgggtcaggctggtctcgaactcctgacctcaggtgatctgcccacctcagcctcccaaagtgctgggattataggcgtgagtcaccgtgcccgactcttctacagtgtttttgttgaagaagctggattatcagttttctagaatttctcacaggaaatgccaaggttggggggagttattaacatctttcctgtagaatcctttactgtgttcctctgtgccttttcatccccctgcaaactggtagttagatctagagtctagagttttaatcaggtttggagttgatttttggcaagaatgcttcctatgtggggccctgtgctttctgttgcatcaggtctgcagaagcttgtctcttctctctctgggtgttggatagatacatgggttcactggttgtgagcctgatccaccaccataaatttccccatcagcatttcacctgccgggtttggcagtcattaatgtgaagggattagcatgtgctactccaaagtatgctgctttagcataaggattattttgagtagaaggcaattaagaagcagcagacagaagaggaactctctgtcctctccctttctgcctaaagcagggtatacatttcccatcaggtagaggagataactcaacgctggagacttgaatctgcataagcaaatcttgctaaataaccctttatcttccattaatttcccctgtatattttacttaccttcccacaatttacatcacctggatgtccaaatccctttttcaccgttttgtcacttttccacaattttttttttttttttttttagacagagtctcactctgtcgcccatgctggagtacagtggtgtgatctgggctcactgcaacctctacctcccaggttcaagggattttcatgcctcagctcctgggtagttgggattacaggtgtgcaccaccacacctggctaatgtttttgtatttttagtagagatggggtttcac[131 bp omitted]aaacggtatatgagcctcaagcctggccacttctttaggttttcacttcttttctgtgaagctcctggatgcatgcataataagccttttctcctgctaatctatcttttgttaatttttttttttaagatggagtctcactctgtcgcccaggctggagtacagttgtgtgatctcggcttactgctacctctgcctcccaggttcaagcaattctcctgtctcagcctcctgagtagctgggactacaggcatgcgccaccatgcccagctaatttttgtattttcagtagagatggcgtttcaccatattggtctggctggtctcgaactcttgacctcaggtgatccacctgcctcggcctcccaaagtgctaggattacaggcatgagccactgtgcctggcctcttttgttaatgtaattagcatgccacagccactgaacctaagacagtagaaaaaaatgtttttttccttccctacagatgctagcctacattcattattttattaaattttgaaaaacgaaaatattctattatttcttttgcatttattagtttcaaattctcgtataaagaaaaattgtgccagctgggcatggtggcgcatgcctgtaatttcaacactttgggaggccaaggccagaggatcacttgaggtcaggagttgaagaccaccctgggcaacatagcaagacacccatcctacaaaaaatttaaaaatataccaggtgtggtggcttgtgcctgtagttccaactactcaggaggctgaggcaggaggattgcttgagccagggaggtgaaggctgcctccagccaagatcatgccactgcactccagcctcggtgaaagagcaagacgctgtctcaaaaaaaaaaaaaaaaaaaaaagagagagagagagaaactgtttaccctgaagtatatagttcatagaggaaagtaaggatgaatccttgattcatttcctttatttaccagttttttaaatgagttgattcccagaagcctcccaaagtaatcacttagtttggctttggtttttagtccctttatgtcctggctgagtatgacagggactttttttttttttaagttcatttatgaatgccaaattcaaagttactttccccagttttcttaccctggtgcaaaactatctcctcccttctgtcagatttaaacatatcgttctaaggtatctagtgccttctccctggatgcttcctttatcgtaagtatcaactggatcataactccttgaaggccttctgcatagcactcaacatcatgcccaaggccgtgcttctcaaacgttattccacatgtgaatcatccaggggcaggggtcttgttaaaattctgatgcattagctctgggtgagcagagcttctgcatttctagcaagcaagcaccaagtgatgctgatgccgctggctcggggaccacactctgagtagcaaaagggtgtggtaaatgtgagaaatcagtttcattcattcagttaagaggcacctactctgggtcactgcatggactaggccctaccactttacagtgcaaagcgtttttttggtgtttgtttgctttactagaaagttttgattttaatttattcttttgaatatgtaatttgcacatggtaaaacatttttgttcataaaatccaaaagggtacacagtgaaagtatctaacttttcaaaagttatcactgttacttctcaagttttattccagataatagcagataatatgcagataatagcatatatttgtaccatatctttattttaaccacatggcagcataatgatctgccactttctttttttcattttactctatcttggagattgtttcatagctcagtgtatatctctacatcctgttgaacagatggtatagtatccacacaagattcatttgttggccaggcatggtggttcacacctgtaatccctgcactttgggagtccagtgcaggcggatcacctgaagtcaggagttcaagaccagcctggctgacgtggcaaaaccccatctctactaaaaatacaaaaattagccggacatggtggcgggcacccatgtagaagatgtaattccatcttctcaggaggctgaggcaggagaatcgtttgaacctgggaagcagaggttgtggtgagccaagattgcaccactgcactccagcctgagcaacagagtgaaactccgtctcaaaaaaaaaaaatgcatttgttattgtttttataaagtataaaatgaagagtgactacttcctgccttttattaaataaaggttatttaataagatttgcttatgcagattcaagtctccagtgttgagttatctcctctacctgatgggaaatgtacaggtcatccccagggagaacaggtgctatgtcttccattctttgaatcctctgaatggcctgacccatgtttgtgcattttgtcaatttcacatgatctagctagtatacatctgtcactcatgtgcacagcttgtctacacttcactttgtctttttctttttggttcagattgcagtctctctagactccaattgtttcttgactgtgtattctgtcagcacttgcaaattgatctggtgttctctggctttaataatatgttattgtgaaatacaacatgcataggtgtgcataaaatgtacatatttaaagaagaaatgaaacatgatatagaagtggcttctgtcacacaccgtccccccttatctcctatgtgccactctcctatcacatgggatctctccatctaaggggcaactactatcctgattctgggttaatcttaagttctctgacgttcctttttgaagtggttctcagactttagtgaatcagacttgcttagagggcttgtcaaaacacagattgctgggccccacccctggtttcgcacttagtagatctgaagtggggcccaagaatttgcatttcttttcagttcccaggggatcctggtgctgccagcgtggggaccacactttgagaactaccgccttatctcagagatactcttaacttgtgtatcgtgactcctagtcccctggggatgctttactcctcccctaaaacctagtcactcgatgggtgtcccttaagcacctcccctcttcttcctgtactccatttcctatcacctagtttgtgagtgcacaatcttcactaagtatttcaactgattgtggcatttcaccagtgtccatagttttcttctctgttggttattccatttatagctttcctctcctttgtgtgtattggaaggaagagcataagcaactttttttttttttttgacagagtcttgctctctcaccgaggctggagtgtagtggtacaattttggctcactgcaacctccgccttccggattcaagcgattctcgtgcctcagcctcctgagtagctgggattacagacatgcatcaccacacccggctcagttttgtatttttagtagagatggggtttcaccatgttggctaggctggtctcgaactcctgacctcatgtgatccgcccacctaattttgtgtttttagtagagatggggttttgccatgttacccaggctggtctcaaactcctgacctcaagggatacacccaccttggcctcccaaagtgctgggattacaggtgtgagccaccgtgcccggccaggaacatttacatgtctcattcacctggtctgtaagcgccttgaaagtaggaaccaagtttaatttcccttgtagtccacttcctcgattaaactgcagttgatggtttacaaacgcagttgcttataaaggccaaaggcaatgtaaacaagtgaagcttgccaagtagaaagttccctggaagccatgtcctgtgtaaagagggcagctgctacttggctttaagccagtcgcaggtccactgttctctaatcttcccagttttcaagagaaaccagaaacaattccaactagtttagtattttaagtacacaaattgggtcagagaaaatacatctacaggaagcaaaactaaatccatttcatgtttcaagatctttgcagtggatggatggatggatggatggatggatggatggatggatggatggatggatgggtgggtggatgggtggatgggtgggtggatggctgggtggatggatggatgcgcgagtgaatgagtgaatctggatcattgcggctgctctctggttgaaactgggggagtagagatacactatctactatatgcctggccgtgtgcaaggggctttatatacttatgtcatttgaccttcataacaacaccacagagtggttatcattcttatttatctccatactcatttcacggataaagaaacagaggcttaggaagactcaaggtcacgctgctagttttctttatttagagcccacctaattccaaaaaaaaaaaggatttcagatgggctcatgtgattgaagctgggtcctgaactttggatttcagatagctctgttacacaaaatcgccactacaaagggaatcaggttttcagaaggtaggtaagggggaatgccaacaggtcagggagtaggtttgatttgtgaaaggaaaataaaaacttgggaccccaattcactctgtcgaaaggaaaaaagataagccgaaagctgagacatgccagaagctgcctttccttttgttcctaaacagatagctacaggtaaaaggttaactatctcaacagatagctattctatgttcaccatatcttatgtaaactgctggatttactgagcatgagacaaatatataatggactattcccctacctgctccttttctcttataacatgtggattcagtgatgtgaccattccctccctctttccccgcttttcccctttaaatactgaagctctcaaaatcatctttggagaaaggcacagaccacagactgttcctctgattctgtatttttttctccccggcattgtccttaaccttggcaaaataaacttctcaattgattgagacctgtctcagatactttttgggttacaaattggcaacccgtgaatggcctctgaatggaggtggccctgacctctgacaaatctatcgttgcttggtactggtttgagctgtctttattgctcaaaccaacaggacagttttctgggtccaggagctcccccttaagagaatgagacctgtctcagataccttttggtttagagattccctgagcatcttactaagcaagtcatagcttcatgctcctcaaggatcccagccaacactaaggagctaagacacaagggggtctcttgccatcttggtgtgtcctttctatttcctcctgtctccctacttactctcctcttggaagtcaagatttctacctatcagccttggggctcattccatcttaattcctttgtaaagcccagtaggaggacagagacgcagatacaggagctgttggatggaaaatgttttattggagttcctgaggcaggaaagagttatggtaggttgagaatcagcgctcacgctagccccctcttccagtggaggtcatggtcactgggcatcaggagttgcgctcctcagtcctttcagctagagggagaggggtcagggttagatggggaacccgtgggtgcccagtataggatggcatggatggaaaggaatttctgcctcggtgtgagttcccgttctcctctatatgtagtagctaagacctcccttcagtttggtgagaaggctgatcctcctttccctgtccccactctctctcccatatcttctgcttcttcccttacccccaagctccataccctcctaatgcccacacctcttaccttaggaaaggcatcccagttgaggaaaggaagtttccttttgatagactaaaagaaagaaagagaaagagagtgatgtgttgcaggtcagccgggcatggatgggtaagcattcccttaatgaactcccacagtaaccatagtaacaataatgtcattattttgtcattactttatcaagagctaatatttcctgaggccttagtctgtgtctgccttgcacgggctgctctacaagcatgatttcagtgggtttttacagcaaccttttgtggtgggaattgtcatcatccccacatcacagaggaagcggaggccgagggagctgaaggcgttcgcatgaggccatgtgagaagtcagtgcagagtcaggagacgcgggccccagctctgtcgctgactttgccttctaagtgcgggtgggcctcagtttttccatagaggatgaggggattcaaataaaatcttgaccgattagcctcttcctcttctgcaattgtccttggggccctgctcctccaccaccatcttaggaaaacacgggtagccaggactggcgccgggggaagctttcttccgttgacagcccattgggcagcatccaggcaggacagtcactccctcccagagatcaggaaccaacccatacatttaaagccaaaatgtgtggccactaccctgggatgactgcagacaaccgaggagggcaaggggcgccggagcactcacctcaaagagggcgtgccagttcaggaactcatcagccttaaacgcctgaggaggaagagagacagcagaagcaggtcagctccaggggaggccagagcttagcccccagccctctggagaaggtgaaggaaccgtggcagctttgcaagctctctaccaaggcgtttatcccctctgtgatgagggtattcgtgggggtagcaccagagaagcgtactcacagatcgcaatttgtcgatgttcaggaacggggtgttaaaggcctaggcagaaacgcagggtgttaggaaagttgctaagaagcaaaaagagagagaggacagactcgtggctggagggccggggaaaacagacggcttacctcgggtcgtgacgcataattctcaatggtgctttcttcctggaaaaggagagggagaaaaggcggcagggggtcacgtgatgccagggcccttgcccacatccctgtctgccagctctgccttcatccacagcccagtccccgaaagaacgcaacccattccccaccatggtctccgttccagtcgcgcacatggttggcggatgtgcagggtgaggagggggaattggagaatggtacatgtaagcagtgtcaccatgggcagcaggcagaaagcctggagccgagcattcctctccggaaaagctagctagtgctgtcctgcagttgacttaagtctaagaggtggggtgttctggagacacccacgctcagtccgtatagctggatgggaaagatttgcgagcaggtgggagcccagctgctgaggtgacccgcctgcctctcactgatcgaggttgctttgctttgtggatttattgccaccactgttggaggttccataatccccctccatggggaccccaccccaggcctcagtgtgtcccatcgtgtcttccccatgacagagcccaacacggagcccgcaggctggatccagatgcttagatctcataaaaatttggtcatttgttttttggtttgaattagacattttgaattagtaagaattcataaattcatccagatttctagtttcccctgaaaaatgtaaaactctaggcacatcttcccaatccatggcgtcaggtggggtgaaagctgccctttcagactgggaaagttggccccatttcacctcaggccctgacagcccccccagctcagtgacaccactggcttggtccttagcagctgagcctgtgcccctgtcttagacttttaaatccggaataggcatcaggattcctctctggctgaggactggatggtaaagattctcactgtggcctatgctccagagacagcagggagccacccgtcacctgggcaccactcccaggggcacaaatgaagcaaagaggagctaagcaggggtgtctccagaacaccccagccccactcctctttgagttaagtcagctgcaggcagaactagctagttttttgctttgcttcaccctctccacctgctgcccatgtggatgcaggcctgggtttggagctgctctgcctcacattgccgttctccagttccccctcttcccctgcacgtccccaggcatgtgtgcagctggaacggaatgggtgaacactcttgagagcccatggtggagatagtctgaacccagaccacccactcagtcccaaggttcagtacacgagcctccccaacacacttcaccatcccttccagaaagaggagcatctctgtcccaaatgtctccccagggatgctctgttccctcctcccttcctcagagccccagtttcttcagcccccatcagaatccaaaactaagagccacttatccaggaatggacaggaggtagagagatggaggggtaggtgggtaacacgtataagaataaaaatgcaggtgacgtgctcacctcaggaccacccagggtggctccctgggcagagtggagcaccaggagggagaggagcaccacggcaggaaggaccgggatcttcatggcgtcaagtttggggtgctctgaggcggggcctcagtgcttgctctttatattgccaaggaggcagatgagcacagaaatggggtccccaccccactgactcacccccagatcttgtcgcccacccccggggctctgggagggggaggcatggactgttcctcatttgcctcggatttctcaattcgcattctgccccaggcacgtggaaggtaacactgcaatgggtctcttcatgcagatggggctgggacagagacaggttggacctgtccctccaagggattggcagtggtacccaagcaacctctccttttgtctttgtctcttttcgttatatccctcattcctctcttagaattcaggctttttcttttcttttcttttctttttttttgacaggctctcactcgttgcccagactggagtgcagtggtgtgatcacagctcactgcagccttgacctcccaggctcaagcaatcctcccacctcagtctccctagtagctgggactagaggcacgcatcacctcacctagctaacttttttattttcttgtagagatgttgcagctttttttttttttaattttctcgtagagatgaaaatgtctcgccatgttgcccaagctggcctcaaactcctggactcaaggggtccgcctgccttgacctcccaaaggactataggtgtgagcctgcgctccatgctcattcaggccttttcttccaccctaccaaaatctatgtaaactctttagcttggcattgaaggtggtccatgctctgaactcaacccacctttataacttcttcctttactagctttgtacatacctcacattctggccaaattagaccccttaccaactatatccttctttttccctcttcaaagcatccggccatgctgttccttattcctaacatggccttctctcatctccagttctcagaacccaacactcatcttggatgaagcttcccagatttttcctgcaatgcccagtccttctctccacacctttcctttcacagaattcccatattcattcgtttgtatgtctctggcattgtatctaagtaagtcatgttctcgccttgtttcccttttagagtatcaagttccttgaggtcaggagctgtatcttgatcagctttacatccccctagaaccatggctcacacagaacccaggtagagtcagcattggtcagatatgatacgttagacttagtattcaggcatccttcagccacagtgtacattttcctttcatggggctgaacctttccattttccaactgcccgtcttttactcttgggtcttcagagaaatgactgtcttgagctaagatgacaaggaacagggaacaaaaaacagctcttagggtgcccagttggagatgggatccaggtaccctgaacctggagtgcccactccatgtcattgccctaacccaccttgccccacccccagtttggaagttggatcacctcactgtgacacaatgtcctagtcaagcagccttctccacagtgaggttcaggtggccaaaccggctcctgctgtaacagggaggggctgggacatggaccggcgctgtcagggaaaagcaagaccttatcaacacaacctgatgcaatgcacggtggcggtggccctgggtgggagggctggacggcatccatgaacaacctttacgaaccccagaagctgggcacctcagctccatcctcacgctgcccccacaccccagtcccagacatcctcttcagcctcctctgattttataatggcagcttcccctttgcagagctacctgagggaacactgcttagagaacactcccttagcccagatggccacacagtagtggatgtcacagagttggtgctcctggaggggacgagttagagaatgactgaggtgggtggagcacctcccaaaaggttttctggaggacacaagttctgtgtaatgaatccttgctaattaacgaacagtgactgaaaaagctcattagccaccattccatccgcatagggtcgactccagggagtgaagaatcagacaaaagagaactgatgttgtataaccagctacgatttgacaggcgggtgaggggacccagtgccagttttggcctgggtgatctagagcatcggtcaatccaacgctgtcttctgttttgctctagagtctaatctgtgattttcctttgacaataaattgccctccctatgttttcctctccacccgatggtattgataacaatgttagctgagttactgaggcttactatatggcagaccttgtactaagtgctccaaatacgcgatctcattgaaatgtcccagtgattctgacacaggtgggtactataattattcacattctataggcgggggaaccacagcatatagaggttaaataactcaccccaggtcacacagccagaatgtgacaggaccagcattagaacgctgggcttccagagcctgaacctatattgctcctctctatgctggacaggctatgttacagcacatgtaacaccctgtgtgaattagacccatgtcctgagagtggggggcagactgcatcgaacccccacaggtcccctttacagtgtccattgtggtgcatagcctgcaccatcagaggtggcagccccaagcataggtgcattcatttaaatgaatcaaactgcacactcttgacaaaatgaaaacgaagaatgaaggttagtggcatcagcccccgaatgaacctgtgattgcctccgtttccagatgcctccagtagtataatcatcttgccacaccaagtatgtgtttacagatagggttccgtttctggatctagtgttcaacattctgctgtttaaaaataggtactttttgtatcatacctctaaacacaggccaactgctttgtgtgctcaaccaaagaaattctcttcctatgctggaaaaaaagctgtctgtgttggactcatgatttgtttccacttggcatcttcctggcaccttctgagggtagttttttggggttttgtttgtttgttgttttttgtttttgagacagagtcttgctctgttgcccaggctagagtgcagtggtatgatctcggctcactgcaacctccacctcccaggaggagtgattctcctgtctcagtctcccgagtagctgggatgacaggcgtgcgccgccacacccagctaatttttgtatttttagcagagacggggtttcaccatgttggccaggatcgtctcaaattcctgacctcaagtgatctgcctcggcctcccaaagtgctgggatcacaggagtgagccacggcgcccagctagttccatcttgacgtgatttttgctgtaagcggccaactttagaagccagtgtctctctccaaactcctccctcttcctccatctacgctgcctgagtagtttgtgttccctgagttgggttgggcagatggggaaagagaggggcagggagttctccctgggagagggtcccagcagttcaggtgatgggctgcaggaaaatctgcccgatacgcagctcagctttggatgaatcacggagggttaatggagtcaggcagccgcagagactggctctgcaacatcacatctccaggtcggcttgacttcctagctccctcactgagaataccagtaaacctctgttttcccacaggcctgcccccaccccaccccaaatctgccagaacttgagtgtgggtaggaggcgaggcccagcctggattgccccattgtgagacacacctagggcctggcagccagcctcctgggtctagggagggagtggggattccaagagagagacactaggttttcggggccttggcgaacactaggtgggaagccgggaatcctgggagagagaggggactgggatgtggagtattagggggcagaactcagggcatccctgtcccatcccttcctccctccgtcggtgttgtcacaaccaagaaagcagcctcatccaccagcaggtgtggtttcttcctttgccgcccaccctatgtgcccggtgcttaaacctctcccaggaagtcttcctggattggtcccacttaattccaatccctctctccattggctaatttgtaaatatttatttggctcttggtactgggggctgtagatggacaaaagacctgccctacagatcccatgtcctagcgaaggagacatcataatgtaaccaaaaatagatacgcaaacaagatgacttcagagaaggacaggtgctgcgaagaaaacggggccatatgatgctgacagggtttccttggtcgatggcctgagggccgagtgcggtggctcgcacctgtagtcccagcactttagggggctgaggcaggaggatcactcaagcccaggagttccagaccagcctgggcaacatggcaagaccccgtctctattaaaatacaaattttaaaaggtggcccagggagggacatttgaaattagtcctaaaagcagatgaagctctggctttctgaagaccttggtaacagccgcccatgttccctgatggcctgtgccagtaggcccagagggacgttagagagggaggccaggcccatcgcatagagccgtagtgaggaatggggattttattccagggctaatgagaagctggtggtaggttccgagcaggggctccttctagggcgttgtggaagaacgggatctaaagaataagatggaagttggggattcaggaggtcactggaggagccctgaagggagaaaggggtacccacccttcactggagggcccctcatgccaggggaccttagcctgcctcgggtgtcactctaagctttcaagagccgctttcagctctttgggccaagaacatctcacgagccaagaaccgtgttgctcacctccgcgtctcccccggtgcctcagtgactgggctgaggagacttcagctccccacgggtttccacccccacccacgctccgggaagctctctgtgcagcgaggacggagcgtcctccctgggagggccccgcgctctcccccctgtggcctctaggaggtactgcaaggccctcctatggcgttgaactccggaggacaagtgcaaaccagcatcaggatttcaggacccaggagagaagggaggccaagcagaggagcggccctcccaggcaggccgactgggtcagctcggtctcctcaagtcagttttgggccgggtttctttcacgtatacatgcactgtttgaggccctgtgcctgtcctgtgggtggagagtgacctaggcagatgggggccatgccctcagggaactcaaacctggagggagtcacttaggctggcagggcgcctcctgtccaccttttacttcctgtcccctgcagggatcccagggggacaaaggggtgggggatccttaatccgggcatgttggaccagcttggtgggacttaggggctcctactgcagacccccagcccagtcccaagggctcttcagcgtgggataagcctggctcagcctgcgccgcagcctctcctgtttcattggtacagtgatggggtggaagtgttctgcctccctccctctgcatcctggaaacacagggcagtcagtgcccgtgataaggccctgggttagatccagtgcccccaacttcctaagcgcgtctccccaaccacgcccccatccccacggcagcctgtccatgtggagaagcacagtctctatcagcacctcgctcctgtttcctgccctctccctgaccttctgggactgacctcccgttttgaacaacctctttccccctgctcctgacttgaatatttccattgtcgctttttcaggccaacaaaa[136 bp omitted]cggtgaaaccccgtctctactaaaaaatacaaaaaattagccgggcgtggtggcgggcgcctgtagtcccagctactcgggaggctgaggcaggagaatggcgtgaacctgggaggcggagcttgcagtgagcggagatcgcgccactgcgctccagcctgggtgacagagcgagactccgtctcaagaaaaaaaaaaaaagaacagtattcaagccgggcatggtggcttccgcctgtaatcccagcaactttgggaggctgaggcgggtagatcacctgaggtcaggagttcaagaacaccctggccaacatggtgaaaccccatctgtactaaagatacaaaaattagccaggtgtggtggcgcatgcgtgtaatcctagctactcaggaggctgaagcaggagaattgcatgaatccaggaggcggaggttgcagtgagccgacatcgtgccactgcactctagcctgggccacagagtgagattgagtctctaaaaaaagaatggtattcagatataggttgggcaatgatttttttttttaacagatgaggaaactgaggcacaatgcaggcttcttgtcagaaataaaacccaggtctcatctctctcagcctctgtgctttataccagtttcaggcagaaggcagattagctgcccctgaatcactcttccatcctccctgagccaggccatcaacatagcattaaagaataaaatttgagaaagtcgtagggaaacaagattcatgttttatttccacagagaaactcaaaagtaggaagctcctccttcctggagaactgtcacagtgacttcaggtcaccaaagggaggaggtacagaaagatgctggtgtatgtgacgaggctggtggccactgaagcaccacagtgcagtgggaagaaacaaggagagacaagctgggtccccagcctaggaaacagaggtgtggcagccgggccagggctggcacaggctgggggccaaggggaggagctccctgacgaccagtgcttttcggggcctcggtggtggttgcaagaaattgcctagaagaaagaaaatcaaatggtagcacgtggccactcctaagcctgcggaaacggggcatcttttcacccagcgtctgggcacccaccattcttttgctgtcctacctgttcgcctgtggtgcccctcacttttgctccgcctaaaacagagtttgtggttctgccgagccaagctatcacctctcgcccatgcagcctcgctgcgtcccacctctgaacccttccaccaggaggctcttttctccacagttcccctgtaacatctctatcccggtccctgtgctccatctagaacaccatcttctcagagctgtgcctatgtggtcccaccctaaggtgctttccgagggtcctaggtcattttctttcttctttctctcttgcttgctttctttccctctttctctctctctctctttctctctttctttccagacagggtctccctctgttgcccagacttggagtgcaatggtgtgatcatagctcactgcagttttgaactcctgggctcaagcgatcttcctgcctctgccttccaagtagctagaactacaggcatgtgtcaccatgcctggctaaggtttttcatttgtttgtttgtttgttttgagacaaggtctcactgtgattgcccaggctggagtgcagcggtgcaatcgcagttcgcagcagcctcaacctcccaagctcaggtgattctcccacctcagcctccagagtagctgggattacaatcatgcaccacctcacctggctaattttttgtatttttagtagacggggttttgccatgtttcccaggctggaatggtttgttttgttttggtttgttttgttttgttcttttagagatggggtcttgctatattgcccagtctggtctcaaactcccagactcaagtgatcctcccaccccagcctcccaaagcacagagattacaggcatgagccactgcacccagccctagatcactttattatgggtctttctccacaccccaccatgaggtcccctcttccttatcacctttagagcacgcacccagagcatacctgacttcatgtcgctgcccactgagatctgaggatataccaagatcctggccctgccccgggtgactgtgcctccactgccaggatgtggcctgggtcggctcactctgacactcacctaccaaaacttcacccactgcagcaggccaggttgcacccgggaagcctgccagaaaaagagaaagtctgagtggccaccacagggtcccttccataccctctggcctcaggccccttctctctccagccagatgaagatcaggcccccatactcaccgaggaagaaggtgagactcccccctgcaaaaagatcaaaggaaagtgatgtggggtcatggcctccctgtactctgccatggcctccacgctcatgaagggcccagcagcaagggcaggctcacaccagggctatcaccaaggttttccagtctgactgtggacattcaggctgtggagttggtttcacagcacgtttatcatcctgagtgcacttgatccaagatgatattgaacatggttcctgggcacgtactgaccaagggggtcaaaagagcataggcctcgctttggcctgccaggtagggagacactgaccacagataacccggcagagtggaagccacagataactcagcagagtggaagccacaggcagtagaagctgcatgtccctcctctcaccagcctgtagtttctcgtccctcagtggaaggtcctctccccaagggcggggactttattgtcatgagagatggaaatacacagcctgctgttgctttgtcagccaaatttgtacttagcatattcatttactgatgttatgagattgccttctttgcaacggaataaaaccaaattctcacgtattttttcttttcatttcctttgtggaataaagcattcatttcaccgccaaccaggcatccacaggccggcctcccctaagtgctagtctgctttcctcgccctccattccatcttcccccgcaaaaaaaggtccacagagagggaacctgtgaggaagagctgcttgcgtgttttgcaggtgtcatgattttttaaagcctatattcttcttggagagggtgttggttctcagttttctctgttgctgctgctgctcctttttaaccttttctgactgggtgggtgtgaggcgcattgaaccctcctgccctccacttccaaactgtctcagggaacccgagtctcccttgcaaaggggtggggaggcctggactcaaagagagcgggatccggcctccggcaaccaaccgagaggaccccggcagtgaaagcctctctccccatccctcatgcagagcccccagcgggaagacagggtggttgccggtctcacctttgcaggggtcttgactgagtacttcccaccataggcagtgggatacgcatgctggttgtaattgtagttctgtggaagaagtgggcatggcggttagaacagacggacgaaggccattttgctctggaataaacatcccaccttcctgcctggaccagacctttcctaaaacacctgcctgctcccctccttgtgtcacgtgttttcttttatacaatctcctccagccagccagggcccccaccctcacctgcctttactgtcctagcccaaatggccgccgcctcctcctcctactcctcctcctgccctcaagacctctgccaactcttcaagtgttacttgggaggtgagggtaggagaccaagaaaagaagtgccaggacgtaacccagcgggtccatggtagatgtctcaccttggaagttacagctgccacctcctgccatcctgcacccggctgagaaagccattgaatggaggagtgaaagagaatttcagattgcccagacccgggagcaaggccaagggggaccaagggccctgcagggtaacttgaggacagagactcacctgatcgtctctgcctgcacgtttctgcagtgatgacgcgtccgcaccctgaaaggaagaaggggccacagttcgtgcctccgcagtcgtgcgggcattgccgggctttcagagccccagtttctccctcaccccacccctttccacgtgctacctatagagaaggcagtgagcctggaggagctgatggcccagatagatagaagacagatatccacactcagcattgggagccagggagagaaccaggtttggcaacaccttccccacccatgccgtgggagagttggcagccccagcctaagactgagctagaacaagtgagctgcagccatgcaggctcctctggggcagacgcaggcactgcagcccagcccaccttctgcctgcaccaagtcctgctgctatgcccgtaggcccttagtccctgcacaccgacgccatgccccacagggtgcttgaaggaggggttgttatctgcagaagctgcgtgcttaggttagctctggaccacaggaagcaaaagaagagaaatacaagaaaacagataaagcaacttaagacactgcagatgcaccggacaccccccccagccccagcgcaagaggagaaactctaagcgttgaaaagaagttcagttcctgccatcacggcttctccacttggaccgtccgccctgccacacacacacacagagtgacagtgaagtcctgactccagcattaattctgccttatccatacctgaccttgaacctaaaccccactgcaagccctaaccctgaggtcacaaactggttgaccatgggcctccagatattttttgcttggtctacttaaaaattaaattagttacagttagagatcagcatcctggttcttcgtgaaacatcagacaacacgccaccctgttcacacatgcatgcatgactgcacttagctggagcgcctcgacctccccctttgcagggccccacctgtccagcctcatatacttggcacacgtagacacgggagcaggcagcctttgtctcagtgcccacgggtcctgtttctcaaaggctactggccatgcagaattggagtgtggtctttggcaccgcccagaggttctccccatcctccctgacccaggtcttcagaccctcagcagctgcctccactagacagggacctgacccctgcacaccgccctcccgttccacctcagctgtcctccccatgccgcagcctaggccccttcttcccctcaatacgatctccccgcacctgtgcaccctgcggtacccacccagccgtggctcccctgggtccaggccaggcccagcaggagcaggagcagagcagaggcagtggccggcttcatgttcatgtgcttgtggaggccccagccctcggcctcggcttttatgctagggaggtcctcccaccctgctcctcagtgactcacggcttctccctctcaccccgcccccactcgggattgcacaaagcctgggaaagtgggaagggaggggaagaaactgggacagacacctgggtcagcggctcgcccagggccccgaaccctgtgtcccagagctgagaagtcctgccccccttacctcaataattgctttccagttgaggaaaggagtgttctgtttgaaatcctgcagggagaaggagggcagagtgggccggggaggcagaacccacggggtggtctatgcagcaaattggggggattccagatctcgggtaggaaggagcttttgggtgtggcttggggttggaggaaggtaagcacgtgggagattgagggtgtcagcacttgagatggtattggtgataagatttggtgataagatttggatgagctgtctcaaaaatgaagagggggagttggctgggcgcggtggctcacgcctgtaatcccagcattttgggaggccgaggcaggtggatcacgaggtcaggagattgagactatcctggctaacatggtataaaccctgtctctactaaaaatacaaaaaaaaaattagccgggcacggtggcaggcgcctgtagtcccagctactcgggaggctgaggcaggagaatggcgtgaacccaggaggcaggagtttgcagtgagccgagatagtgccactgtacttcagcctgggtgatagagcgagactctgtctcaaaaaaaaaaagggggggagttttgaaacaggtggttggagcagagggtggctgccttgagggaggcttggggagagtcaggagggccaggcccccagttcttcaaacagcaagaattctcctacctcccagagtcggctgaagtagaggagggctcgggtgctggggggcgggacctggttctgtggatgaaaggcggggagcaggttagcagagagcctgggcccactcacccacccctcctcctgctactgccctatctcaaccttcagaatgtcattgtgactaaggttggggatgggaggagctgagagtctttagggacaccaggaaaccattttgggaaacacagggagagagagaggcactaaccaactctccctgtcccagagcatacaatgttttctatcccaagttccccagcctccagcagaacctaattctagcaaaacctcaagactaggacctgcctcagagtgtcccctttccacctgccgggcctcctccagcccgtttcccgaagctgtggggctgcagccaccccttccacaccaccctggataacagcggagacgtaagaaaggagcagaggccaggagtgtggggcagctaaggtttatttcaagggcaagggctgagattagtgatgagagggtggtgttttaaggagggagtgtgggggctcccatccaatctggtggctccttgtctggaggtcacgggatgcgagagcttctctggtcctgggcaaagaaacaggtttttttttgtttttttttttttttttttgagatggagtctcgctctgtcgcccaggctggagtgcagtggcacgatatcagctcaccgcaacctccgcttcccaggttcaagcgattctcctgcctcagcctcccaagtagctgggactacaggcgcacaccaccacgcctggctaatttttgtatttttagtagagatggggtttcaccacattggccaggctggtttcagactcctgacctcaagtgatctgccagcctcggcctcccaaagtgctaggattacaggcatgagccaccgcgcctggccagaaataggttctaagagagagcttgagaaataggaattccagggcattgtgagccagcacaagggtataagagacccctgctccagaaacctacagggacctttttgcccaccactgctatccaaacaaacccagatatcctggcttgggcttaagaaccccctgcatcgtcaggaacattacactgcgttcccctctgctccctcctcactctggctgaagtcctcagctccctcaccccactgtgaagaatggggctccattctctcccctgcccacctctgccctgccctgctttctaggagatctgccccttgaggagctggcccagatggatcctgcctcactgcgatcactccctcgactgccgccctagatgggcaaaactggcagggtgtctatcctggctctctgggaagtgtctgtatgtgccccggctctcccatcagaccctaagttccctgtgacccaggaaagagtcttgctcctaccagaaaccgttctctgtgaaacagagaggccagatgcagtgactcatgcctgtaatcccaacattttgggaagccaaggtgggcagatcactggaggtcaggagttcgagaccagcctggccaacatagtgaaagcccatctctactaaaaatacaaacattacccgggtgtggtggcgggcacctgtaaactcagctactggagcggctgaggcaggagaatcattttgaacccaggaggcagaggctgcattgagctgagatcgaaccactacactccaacctgggtgacagagcgagactccgtctcaccaaaaaaaaaaaaaacaaaagaaagaaagaaagaaaaagaaaaaagaaaagaaacagagaacatgaatccactgtagctgggtgggaacatctgtactctcctgtctcctcaatctccttcctaaaaggtcagacttagattttcctgagcccagtcttctctcttttacattaaaggccagaaactccactgctcacaggggccagtcaggtggctaaaatgactgtgacaggtagggacagtctggccactagggagtgacccccccacccattcccaacaccccccacctgggccaagcagcagctgtttctcagctctagcctaaccccaccccatggaaatggaacccagtgttaccaaagtttttgaaagaaaccagaaatccaaatcattatgtgaagtctctccatgtttaaactttgacaattaattcatattcttaaaaaaaaaaaaaaatagagtgtctcaaaaacccatcctccaatcacgaatcgcagcttctgccgggggtgtgtctgcatgggttgtccacctgtccttcctcccctcccttccactccagccccctctactctagaggtgcctgtgctactcaggtatcaaagcagcctggccaggggttcccctgcaagacggaagggtaggcagggaggaaggagggaggggttctgcgccccagctgtgtttttgtttgtgcgggagagactaatgcctgtcacccctgaggctctcggccagtgctggttcctttctctgggtgcccttcctcttggggcctcttagctccacctcactcctcattccatgtgccctctaggagtcaatctactctccccttaaccttccccatctcaaaggggaaagtgaggttcaggacctgctcgggtctatatgctgaaacagcaaagaagcccgtcccctctgctcaacctcaatctcagctgctccagattctccccctcttttcaggtctcctctgtcctccctcctccacccccagtgtgtttagtttttgtttttagcactggcctaaatgcttcctcagtggccagcatcactgtttccccagctcacagagcggaggtttagctttcttccctatagccctctccgacgaagatgtccagcccttaccttgtttatggcatcccagttgatgaaacccagcttggatttaaaattctatggaggaaacaaaaagaagaatggccaaattgagtcataaggtaattggccgagagaggtcaagggccactgctgactgttggtttagaaagaggaccccagactgtggggccaagggcaggggttggttttccaaatgcgagtgaacagagccatctcgcagaactcaccttccagaaagtgtcaaagttaaacatcccaggagacgtctcagagttctatggaaccaaggagatatgggatgagagaagaacccactttgtgagccagagtcgggagatctgagtggcaggaggggaggcgaggattgtgtgacaccatggtcccagcccaaggtggagtgttgcctccactcaccacagtattgactccaccaacagcgtcacctcctccactgccccagctcgacccttgcccctgggtggggaaaagggggaccgatgtccaaggcttatgcttcctatcatgcctgccacctgtcaacctgccccggattgcttcatccccacctcggtccaggcttcctgtcctcctctctataaagctgccttctcttccttacacagcaccaaaaagttcacttgggaaagctttcttagaatggattgctcccatggaaccccacccagtcccctgaatctcaatattcagactcttgcctccatcctggtctgtccccaaaacacctcaagcaaatgagattagctaacgtgtagtcccacggcacgccaagcaccatgccttatgcagcatctgtctccagagtctggactccacaacaccttggtctggtggtgacatggaaagctgtacagtaactgaaggctgcgtgagtcaggtttcactgtcctcattttactggaggaagctcaggctcggagaggttagctgacttgcctgaagatatacagatgacatgatagagctggtggtgattttaatatatatcttaaatttttttgaggctgggcatcgtgggtcacgcctgtaatcccagcactttgagaggccgaggtgggtggatcacctgaggtcaggagtttgaaaacagcctggccaacatagtgaaaccccatctctactaaaaatacaaaattagtcaggcatggtggcacatgcctgtaatcccagctacttgggaggctgaggcatgtaatcctagctacctgggattacaggtgtgagccactgcacatggcctattattttctttttaaaaagtagagacagggtcttcctacgttgctcaggctggtctcaaacttctgggctcaaatgatccccacacctcagcctcccaaagtgctgggattacagttatgctggtgcctggccagagctggctttcgaaacctcatcttctacctcaaagctcagtgactttctccttctcaacactgcctccctaagtatggaaatccccttgaccattcttctgttacttttatctgttttctccccttacaaaagtaacatggctccgatccaaatcaaaaggaaggaaggaatgaatgaaccaaagatggagatggggatcccagaaccctgttttggtctcttgatggtcactggacgcagattcagagcagcttgcaagaagaaactgatatttttgtttcttttcccaggatcttagcatgcttcaccatcccttctcctaaagccaaccctgcctgcccctaggctcaccctataattgtctccagagcctccaaggaggcgattgccctctttgcttatttcctagggagacagaaaacggagaggagttgatggggaggcaggcgggcagggggacgagagggcaaggaagcagggtgtcggcgagggattcctgaatcgggggactgagacatgagcatgacagaggacttcccagaggcctgagaaagaggtccttctctcggggaagttccatctgccctgagatctcgtttcaagctcctgtgggtcgggtggctgctcacttacgatgtccatagataacatcgccatctctgtttatgttcatttctgcaagccgcccaaaatccatcagggagggctttgccagcaaagcatccgaattctcccctggctttggagctggagtgggccaggctgttacactaaattgattcaaactgaaggaccctgtctgggctgattggcattagtaaaaaaaggagatgctagctggagagccagtgggggctgaggcggcatagagtagactggctggtcccctcttaagggagaggtgggctcctctggagtcctgctttatctgctgtgaaacatggccagacccatcagtacttcctcgttcccagagctctcaggtagacctggcagggatgtgggaccacctgtctgccagtattgctcctggagaacagacctctaccccacttactaccggcacagtctctgaccccacatctaccatcctcttaccctcatgttgctggaaactccctgtcctctgaagccctgcagggtgagacaaagaaacacagacccctgctgaagatcctgaggccacccccgaaaattaatgtattgatttaatatgattcctctaagaatcctaatggcactctcttttggaactggtccaaacactgacatttttttaggagaatgaaagtttaagaataggtaagaaaacactggaaaagataaatggtaagtgaagataagaggtagatagtaacatactctaaagctaccataaataaagcagtcctgtccgacagaattcccagaaactccccaaaatactaaggtatttacaagaggcattttaaatcagtggttgaagtgattgaatacatgggaatgggaatatcagtgaagtattttgggggaaaattttagttctagctcatcaatttcctcctctctgtttttaaccagttttcccctcataaaggaggacacagctcggatacaaagcgtagggtaagtctggttagatggaggggtgggactagacagcatataggaaaacaaagtccagatgcatcccagttaaactgaaaaagtgaaattgcaggagtatgcatagtgctagaagaaaattaccttaaagcggtacaccaagagcaaaaaccatagaggaaaagatggctgctttttgactacttatatacttaaaactgaggtatattaaaaaactagaaaagtccgagtgcagtagctcatgcctgtaatcccagcactttgagaggcagaggcggacagatcacctgagatcaggagtttgagaccagcctggccaacatggtgaaaccccatctctactaaaaatacaaaaaaaaattagccagaggtggtggctggcgtctgtaatcccagctactcgggaggctgaggtaagagaatcgcttgaacccaggaggtggagtttccagtgagctcagatcgcaccactgccctccagcctgggtaacagagcgggactccatctcaaaaaggaaaaaaacacaaactagaaagagggttacaaatgggaagaaatttttttttaaaaaaaccagtttgttcccataaaaggttagtatccctcatagattatctaaaaagagatgtctctactcagccccagcacctccggtctggccttgcccctggccacgtgggtcctttcccaccaacgcctcacccaggagcttgttagcaacgcggctaacaggctcagccccacccagccctgttagagcaacctgcactttcacaagatctccgtgacactaactctcagcaccacaggtgctgacataaagcccacatttccagcataactggggggaatgtttttccaaagcactctgaatcccccagagttcaccacagtctgttccccggctggatagaggacatttaagacaattgtgcttctaaaaggaccggtttacatggaatttctcccagccccatctgtggtataaggtgaggtatatcacagcaagatttgcaattaattagtactttggaaatcgttagcatttttaggagtgcatttggtttcttctgccgaaatagtcagttccctgcagacaaggcaggagggggttgagcagagttgagttaggaggagtgggcacagtcctgggcaggaactgcagtccccaggagacttaagagactttggctctcacctgaatcccagattccccgctcccgcgggcttcattccctggcttttcacactgccggggagagaaaggggagactttccctcagtcccctcccagaccagtcccagccccaaaatggcagcattttaaccctggggcgagccgcttccgctccacctccgcggccatccagccccatctccgcggagccttggctccccgatcctgcgagtgaaaccagctgctctccttttccttcccgcggttggtgggagattcacgccagccactcaccccgggtttatgtccatttcctccgccgctcccaccgtggttgccggaggaggagccggtgctggatccctgcaggggaaagcaagatttcaaacgctgtcctaaaggacctaaaggggacccagtcgttcccagcggtgttacagatttgttggaaccccaatcagattccagtcctctttccaacctccagaccttccccctctttagcctgttggtcgctgcaggaagttattccgagcatggagaaggccaggtgtggccgagggtattcggaactacgcaatgatttggagaacctgagctgctgcccaccgcaggccgggggtgggaacccctggagcccggccgcgcagtagccgcgatcctgccaccagggggcagcaagtggaagggaccctagagccctcacctgggagcggccgtagctgccttggtcaccattcccagaactgccctagatgggggagaggaggatcatacggggagcggcgcatgagagcagctcaggttattcggcttattgtgtccacgcacctcctcctgtctgacacttttcccgacccccgaggaagccagatgtggctccctctccagctcgactccaagacacgggatgggagaggccgtcagccaaggggttggacaggccattgaccaggaggctggagagactgccggctctggagtcagtgaggcccggggccctggggtggcagctgcggggtcacagcgccccttcctgccctcacacccatcgtgcaggggccccatgtgtgaatgtcgtctgcaccgtcgctctgtcagcgtccgtaggtctcccggatcacagtcctgcccccattctcctgggagcttcccagacaagtgtcatattctcccatgtccccctctttctccgccaccccacggtctcctgagacttgccaagtggacttgactgcaagagcttagacaggcgggataacgtccccaccatcacagagtggaaaatagggatacagagtcagaagcagtggggtggctctggcagaaacgatagtgcgcgcatcaggggcacagcatgggtggggaacaggaggctgagggagcctcagggtgacgactatcagcgaggccgcccatcctcgggcagcggcagctttcagagaaacttggagccctctcccggcagggaccactagggcctcaccccatctcagccttccacagaggtgccaaactcacccaggaggactcactgccgctgtcacctctgctgccaccactgttgccactgctgccaccactgctgccgccactgctgccgccactgctgctgccactgctgctgccaccactgctgctgccattgttgttgtcaccattgctgccactgccactgctgcccgactgtgagccgctgcctccctgaggggcaggaagggagcagggctgggattaaagacagagcaccaagacgggcccctcctccctccctctccacccaggccatattccatgatgcccagtctaaggggagcagaacttctccatttcctcctggtgcacaactcctgggttgcccctctccactcaccccagagttgctggagcctccacctgagccagatggtgggggattcgtgcactgtcgagggaaagggatggtgagtttggggacggtgagtttggagacgttggcctcggccatggacacaggccaggcctctcccattctttggggcttggcttcctttctcctaatgtgtttctcccacctccccttcccatctgcctcctccccaggcccaggcccgtctcttcctccttttttttttttttttttttttgagacagggtctcactctgttgctcaggctggagtgcagtgatgcgatctcggctcactgcaacctccatctcccaggttcaagtgattctcctgcctccgcctcccaagtggctgcaattacaggcgcatgccactatgaccggctgatttttgtatttttagtgaagacagggtttcaccatgttgaccaggctggtcttgaactcctgacctcaggtgatccacgtgccttggcctcccaaagtgctgggattacaggtgtgagccacctcgcccagccccatctcttcctctcaccccaatccctccactcccccatcttgctttcctctttgtctttccccagctctctgtagcctgcacccagtggcttcttcatttgttcccagccccttcctcttaccccttcattctggttgctggctctcactgaaccatagccaggctgggccacagctccctgcagagagggtgagactgagagtaggatccagagggaccagggaggcacgcggagcatgtgggcttggagggagggaggtggcaggtagcaggtctgggggtgactttacctgagtgttggtcccaaagtttggtggccctccattgcctccttgaccccagggagctccctgaggattcattccaaagctgcctgctgagtttccggggtatccgtggacccacggagtccccagacctccaggattgccctggccctggcctccaaggccaccttgagagccaaagatgccatggcctccagaagtttcctgcaagaacaacatacctgcacttagtgggaccatctctgaccctggtagagaagagccagggcaaatcataaagagaccaggagagagacaggcagagggactccagggtggcataggaggggggcagaacatagaaggaagctgccccagaagcctgcaagtaagagatccatccatcctttcaaccgtttcccaagaatctcagcccagcagcccacagcctcccatttccacatgcagccccacagccactcacccaagcaccattgtggccaggcaccccctgccaggagccgcggacagcatctgctccgtgtcgaatgacatcttctgcctgtctgccaatctcgtgcccagtgtttcccagagcatgggctgcttccccgaccctgttgcccaaagcatctgctacgccaaagcctggaacctgcctgactccagtgccaactgcttctctggtcccttggccaagggcctcactgactttagagccagctgcccctccggcctctttgccaatggcctttcccaccccttcgctcagggcgtctcccaggccatgtccaagggcctccccaatatttgtcccagtgctttcctctccgctctgcagggggccagcctccccactgcccaggcagagggccagcaggaggcaggccaggggcccctggaacttcatctctgcccagccccctctctctccagagtgtcttcctcccaccagggtctcctccttgccgcccttgctctgcgtctctgtgccctcctctgtcctcctccttccgactccctgtcctccctccctctgggtctgcagccttctctctcctgtcctcaactgcctgggcttctcagagtccacctccctgtcactactccttatactctaggttgggagaaggtgacagggctgggcaacctgaggtccctccccgcagtgactcagggcccagccaccaatagggtaatcagctgttattgtgagtctgagagtctctgtcgaaacagagagtgagccgcatcagggagggagggagaaatggatgaggtgatgcaaaagtgctcccatttcccaaccccaggcattcggggagctgggtgggggcaggggcatctaaggagacaggttgtcgttggctcctggaggcggtggggtgggggcagacttagaagagaggagttactggcaggaccccaccaaaggagtaaggacagggaagccccaggggacaggacccacccaggctcagccagcctggctcaggggctccagagtgacaggcattgcccgtcctcggcctggcctttctcggtttcagcacctcagcctctcctctccctctcccctcccgcattgccacctacaggtgactgccttcttgttcctccacaccttccagcccacagagagagactggcaaacacggggctgcgtgtcagtttctgagattctggggagagcccccggggggaccctcggtgtcggggaaggaggtggccatagccctttgagtggtcagcagggtgtctcagcgttcaggctgctcccggctgagaaagctgggcgcggagcagggcagccaggcgcgccagccacccccagggaacgagtgggagggaaggccaagggagggagccgctgacccaggcacccatcctgtttacgcagccctagaggggcacgtgtgagtataagcgcctatgaggggcgggactgggccagctcaccccacccatcccccaggccaggggccagggcagcaatggcaagcgagaagagggtagcgcaaggtcaggagccatccgtgagagccacggccctctccccagtcccagctcgggatacagaacctgggagcctccccccgcctcacccctgcccagcaagtgtggctgcttctctattcccaggggccacagggcctcccactgtttcgtatcactggggttcatcgcccagttaggaggggccagtttccatcagcctttctcaatgtctctcagtcagtctctctcttctctccaccccaatatccgcaccccagcttataacatccaacacttcttaccttgtaaacactatccccatctgtcctcctcagctcctacttccctgttattccatctctgactcgttaatgatgataatagcgatggtggtaataataataataataataataataattacagctccagcttatcagcggttctgtatgtacccagcattggactaagcacaagcagtttaagaattatacaactctgggagatggttctttttttctagagacagggtcttgcccaggctggagtacactggcacaattgtagctcactgcagcatcgacctcctgggctcaagcgatcctcctgtctcagtctcccaagtagctgggactatagatgcacaccagcacacccagctaattttttttttctttttgagacagagtcttactctgttgcccaggctgaagtgcaatggcacgatcttggctcactgcaacctccgcctcccaggttcaagtgattatcctgcctcagcctcccaagtagctgggattacaggcgcatgctgggcctgtaatcccacgctgggctaatttttgtgtttttagtagagacagggtttcacca[139 bp omitted]ttgttgtgttgcccaggctgatctcaaacccctgggctcatacgatcctcctgccttagcctcccaaagtgctgggatgacaggcatgagcaaacagtggtattacattatgcttgctgcagctcctgcactctctttgttttttgtttgtttgtttgttttgtttcgagatggagtctccctctgttgcccaggctggagtgcaatggcgcaatctcggctcactgcaacctccacctccagagttcaagcaattctccttcctcagcctcccaaatagctgggattgcagatgcacaccaccatgcccagttaatttttgtatttttagtagagacggagtttgaccatgttggacaagctggtctcgaactcctgacctcaagtgatctgcctgccttggcctcccaaagcgctgggattacaggcatgagccaccacgcccggccatgtgccctttttgttaagaaggaagattagcaagtatgaaagaggtgttctgactcaccagcacagctggacatggggtctttctcaaaggtaggtccaggcctcaagaaaataacactaataataaattttttcaaaaactaaaatgaagtctttctctttaacatagtcagagagcttaaaagaaaattgagaagaaagtaagtttctccctgtgtgattcagttattcaaagccgtgtccatggatcacctcaattctcccatgccaccaacaggcctgtgttctacctgctaggaaaaaattgcccctcagacatcgctgggcctgaggagccacctcagatcagccctagggcatccttattaaataactagtgtgaaccaaataaaatattaggtgctttcacatacatgatctcattgaatcctcaatatgaccacaagaggttaatattattcccattatacagatgaggtaactgaggcccaagtggctcagcatcacacacaaaatcatatgtgaaaagactgtggtaaaatagagttgtcaaaacttgagccaggcactttgggaggctaaggcaggtggatcatctgaggtcaggagttcaagaccagtctggccaacatggtgaaaaccccctctctactaaaaatacaaaaattagccgaacgtggtgacaggcacctataatcccagctactcaggaggctgaagcaggaaaattgtttgaacctggaaagtggaggttgcagtgagccgagattgcaccattgcactccagcctggacaacagagcgaaactccgtctcaaaacaacaacaacaacaaaaaaaaacttgagccaggtcagtctgactccaaacagctttctctcctccatcaccatgccacccatgttcttatgcgtgatggcacccacaaatctgatatgcctatgtcatgtccaaggccctctggtctcagctcttctctctaattcacatcattcattcagcaaatatttatgactacctgctccgtgacacgcctattccagacactggggatacagcctagaaaccattctccagctgagtgacacctcataatcccagctcatgcctgcaagcccagcactttgggaggccgaggcaagtggatcacttgaggtcaaaagttcgagaccagcctgggcaacacagagagaccccaactataaaaaatgtttttgaaaaagtagttggatgtggtggtgcacacctgtagttctagctactccagaggctgaggtgagaggatcgcttgagctctggaggttgaggctgctatgaccacaccactgcactccagtctgggtgacagagtgagaccttgtctcaaaaaaagcattctccttgcagaacttacattcatggtgggggaagttaggcaataggtgacagagaggtgttttaaatagggtactcgggaaaggctctttgagatgtggcctgtgagctgacccctgcagggagtggaagagtgagccatggggattagctggggctagtggattccaagcagggggaacagccatgcaaaggcctggaggcaggagcctgcctactgtatttgagaaccattgtggctggagcagtgttgggatgggagaagctaaagtcaaagagggaaagatcctggggtcttgcggactattatgaagactggcttttttttttttttttttttttgagactgggtcttgctctgtcgctcaggctgaaggtcaatggcgcaatctcggctcaccacaacctccgcctccagcgtacaagtgattctcctgccttagcctcccgagtagctgggattataggcgcctgccaccacgcctggctaatttttgtatttttagtagaaacggggtttcaccatgttgtctaggctggtctggaactcctgacctcaagtgatccacccgcctaggcctcccaaagtgctgggattacaggcgtcagccaccacacctggccaactttgacttttatttttactctgaatgaggtagaaccagccaagggttctgggctgccacgggtgctaacagagttcccctagggaactgattgttgggggttgtggagtagagagaccagggaggagggagattggaggctggactcagtctagtgggaagatgaggctttgggggtgggtgatgtctctgctcccttctggggggtcccagatctcaaactggcacctacagtcttacctcttccacggtgcctatcccagagcctacattcaaaccctagctccaccgcttactaaccatgatcttaacccatctgtgcaacagttttctcatctgtaaagaggggtgaatgtgaggattaagtgaagtaatacatgtaaattgcttagagaagtgtctgccactcagaagcactcaatatatgttctcggcagtgctggtcacattgctgtggctggaatgctttcttggcagttgtttaatcttgtgacacacacatgcacacatcctgaaaatgccagatgcatggctcatgcctgtaatcccaaaaccgtgggaggccaaggagggaagattgcttgagcccaagagttcccgaccaagctgggcaacatcgtgagaccctgtctctacaaaaaatacaaaaattgccagggtgtagtgacgtgtgcccatagtcccagccacttgggaagctgaggcacacggatcacttgaatccaggaggctgaggttgcagtgagccatgattacgccactgcactccagcctggacaacagggtgagaccctgcctcaattaaaaaaaaaatgccagatgcagaaacttacttttaaagaacactcatttggagccaggagagggtagctctcacctgtaatcccagcactttgggaggccaaggcaggcagatcacctaaagtcaggagttcgagaccagcctggccaacatggtgaaacctcatggctactaaaaatacaaaaattagccaggcgtggtgtgcgcctgtaatcccagctacttaggaggctgaggcaggagaatctcctgaacccggggttcggaggttgcagtgagccaagatcgcaccactgcactccagcctgggcaacagaacaagactctgtcaaaaaaaaaaaaaaaaaaacccactcatttggatgtagccccctcccgcttcctgggggtcgcaagggcagcatgccacctcactgctagagatgttcagcagggaagtgcccttgaactggagcctggccatcaccactgactagcagggtggcctcaggcaacacgctccgttccgtgcacctcttcttcaacatctgtgagggcaatgatcatggtacttgcctcccggatggttgtggggatgaaatgaatcatgcctgtaagtgcttagcacagaccctgtaaaagatgcccggtgagagccacacccaaactcctctccctgttcttcaacatcctcagaaaccggcccttcctctctgtgtttctccctagcctggctccacccatctcaggcaaagcagcctgtgtcttgctcacactcgttccatggcccttcccaacctgctcaagtcagtggcttcccttctgctccttgccagacattcatgcctggccttgacatcactgcttgaacctctttgtctggggggaaatggatacgatatttgtaatatgattacagattgtcataaccaacaagaaaaacaagatcagcgctatgagagagagtgacagggtggccgtagctcaggttgagcggtcaaggtagctgagatgcaaagggtagggaagagccagtatgaggggccgaggggcatggagagtgttcctagtagagggaacagcacagaagacctccaggcaggagagagccaggcgtcttttaccctcaaaaccgactcaaagctctcctttttcagaagcttcccaggactgactcagtgcctatcaattatcttgtatctctttggtattttcaggacccccatccaagcaaacccagcaagaaaatgtgcctaaaaaatagtcagtcagccgggtgatggccaggcgcggtggctcacgcctgtaatcccaatactttgggaggccaaggcgggcgaatcaactgaagtcaggagttcaagaccagcctgaccaacatggtgaaaccccgtctctactgaaaatacaaaaattagctgggtgtggtggcgcgcacctgtaagggaggctgaggcaggagaattgcttgagcctgggaagcagaggttgcagtgagccgatatcaccccactgcaatccagcctggatgaaaaagcaagactctgtctcaatatatatatatacatacacatatatacatatatatacacgtatatatatacacacacatatatgtatatttttttaaataaaaataaagtcaatgaaagcttttacttcaagaaagaaagagtcccttgaatgttgccttttcgaaagccgccactataggattcttttaagtagggcctcccccaatacctgtgagatgatgtccagcacggagcagaccctcaatcagtatctgacatgaatggaaggttctatttatatcagtgcagcaagcagctgggtgctgtggctcacacctgtattcctagcactttgggagcctgaggcaggaggattgcttgagctcaggatttcaagaccagcctgggcaacattatgagaccctcgtctctacaaaaaaaaattacaaaattagccaggcatggtggtgtgtgcttgtagtcccagctacttgggaggctgaggtgggaggattgcttgagcccaggagattgaggctgcagttagccatgactgtgccactgcactccagcctgaacgatagaccaagactctgtctcaaaaaataaataagacaaaatgcagcaaatataatgtttacagtttactttgaaatacatcaaaaatgtttgatatggggctaaatggacagatgtgtgaccaagcaagtatggtaaaatctaagtggtgagaattctggtgttcactataaaattctttcatcttttcatgatgcttgaaatgttttcaaaataaaatatcgcagggggagggaaggagcatatgtaatgaaatgatggtattccacaaaataagggaaaatgcagtgactataaagtgaggaacgtcccattttttgcacaaatgcaggcccctccccttgccggtcattgagctcttattgatgcgtggctttgtgtgtttgcattcacattctgtttataggccttgcctcccaggaaggctgtgaattccccaagggcaagaacactgtctattattttcagtcccccattgatggaattttgtagctggaagcaacagttgtcgaatccctgcctccctttatacaggaggaaatcgtggcccctagaggggaagtaggcggccttcaggcatcttgctcccgattggaacgcaagtctcccagcacccaggctagtgcctgggagtgttacagagacttcaccgggaaccacgagaagtcaggtgctggcgacagacggagccagacccaggcctgctgctttctctgtgggcgcccttgtcccactgagccgcagcatcctcatccatacaacggtgacgataacagggcttctgcctttgggttgtgggagacttaaagagttaaagaacatgaacaggccagatgaagtggctcatgcctgtaatcccaccactttgggaggccgaggcaggagaatcccttgagcccaggagtttgagaacagcgtgggcaatatagtgaggccctgtctctaccaaaaaaagaaaaaaaaaatttttttttgagacagggtctcaccctgtcacccaggctggagtgcagaggtgcaatctcggctcactgtaacctccacttcccaggttcaagtgattctcctgcctcaacctcctgagcagctgggattacaggcacgcgccaccacacccagctaatttcttttttggtatttttagtagagacagggtttcaccatgttggtcaggctagtctcgaactcctgacctcatgatctgccagcctcggcctcccaaagtactgggattacaggcatgagccactgtgcccggccaaaaaaataatttttaattagccaagtgtggtggtgtgtgcctgtagttccagctactcaagaggctgaggtgggagaatcccttgagcccaggagtttgagaacagcctgggcaatatagtgagaccccatctcttaaaaaaaaaaaagaaagaaaaagaaaatttgatgagccaagtgtggtggcgcgtacctgtagtaattccagctactcaagaggctgaggtgggaggatttcttgagcccaggaggtcgaggcagcagtgagccatgatcgcatctctgcactctggcctgggcgaaagagcaagattctgtctcaaaaaaaaaaaaaaaaaaaaaaaaaaaaagaatatgaacaactctggacacggtaccttgagtctagcaagtgctctatgctcagtaattgtaatcattgttcctctgggctttgaatggtccacagatctgaaaatggggccttctgtgcccctactcaggtggctcctgtcaccagcatgtcttccacctgagccttccatccttctccctctttcccctgagaggatccccagccccatcccgtgtctcacttttcttattcaccaattctccttctctgctgacgccaaagggcaaagacctctgtttttccagaatatcctttgtagctcttcactgtttctctccttccacttactgactgtgtaaacttggtcatgtttcttaatgtgtgcaagcgcccacgtgcttctctataaaatggggcaataacagtccctttcacctaactggggggttgggaggagtcaatgatgtcatgcaggtaacgcacctggcaggcagcctggcaggtcttaactgcacaataaatacaagttattgttgttattattttggcgccccccacccccttgactgaggatgctacctcctgggcccagaccattctctcccggtgtgtctgtccccacgagtggcctgcagtggttttccctgcacgagtcctcctgccagtagccagcacgaactttgcaccccagcaaagcgtggtttgtccccattacccgccctcttacagctaatcagcctgaaatctccagctcaacccaccctatgcctcagacactccgactccttcagcaaagtaacaagaaaagacaaggccctcctgcctccctgtccatccctccttagggagcccaggggaccacaatgagacagcatagtgtatcaagtttattcacaaatcccagtacaacccccttcagggatttcagaaacctgtcccccacccccaacccctccaggtcatgtcagctgatgtgacaacggcgacattattctcccagcaaggccggatgccagtttagggcatgatgttggcgacgctctggaagagagaaggagagcaggggtgaatgtagggtccacagtcatgacgggacccgagacctcagccccgcccctcgggagaagcacaaggggactggctgctctggccccggagttatgttctggggaagtttcaggaaggtagcatctaaacttaagaacacaaggaagccagtccccacaggcagaggggctggggcctctgcaggaaccaacaagcctcgtgtgtttagcctgagaggatgctctgccgcccccatagcctgggatacacaagggtgggccttcctcctccgtgatacaccctcaccctggcctgcaccaggt[133 bp omitted]tggtgaaacccctgtctctactaaaaatacaaaaattagctgggcatgttggcgcacacctgtaatcccagccactcaggagactgagataggagaatcacttgaacccagaagacggaggttgcagcgagctgagattgcaccactgcactccagcctgggagatagagtgagactccgtctcaataaattaaaataaagaaagagagtcaggagtttactttgagccccaactgggaaccaggattccataggagcctctgcactggggtgaccttgcaccagggagaggacaaagacacaggctccccctcccagcatgaagcaaaggcatttgcaggagggttgggacaggagggaagccagtcagcaaatgggaatcgaggaatgacaaggagagagagggaatgagaacagtcagcagcccctcctccctccctggctcccaggggcaccagggcctgggaggtcttttctgccagcttgtgtttgccttggtggaaatgaaaggcacccaaaagatgagggcagggtgcaaaggggagggagcaggtggagagagggaagcccaggactgggtatcaggttggagggtctttgcagaggctgcaggtctgcccgcccggggagctgtccaaacagacaccgggaaggggtcggggtgagcgtatctatcaggacgcagagcagaaaagagacaccatggggcactcaccctccacagggcgggaaggttgatgaaaggcgtgttgaccgaggcctgcaattcaaggacaagaaggtcagtctccagcgtctgacccacagccatgctagggaactcccaggggcctcctctcccctaccccagagtccgcgcttaccccagaggctaacggcgtggttgtggcccctccttgatggctggaagatccgctttgatggttgccctgtggacaaagcccagactcttgttacaaccccacaaacgcggagggtctcccagttccttttccccagggacctggtcccctccagggtgactggggctgcggtgggaggcacagcttaacccactgcctcctcactgtccagaagaaaacccaaagcccgtgctcgcgtgggcattctgcctcctgctgccttttcctccccaaagccccttttaatttccttaatgaagtgctctcagtcatggaggaggggctggtggaaagggaaggtagaggacccgtgacaaacaatatcaggacctagtttaacctcagccctgacctcaaatctacccttctatgccctgtctagctgcatccctaactccactgatccttgtccttaacccagccccagacactcagccatgcaccccagcagtgcccccaaccccggctgctgttgccagccccaaatcctacagtgcaccgtcctctgctcgcggcaccctgcagcctgccgtgcccgctcctctgctgcgccgttcctccccacccacccatccctggctctgtctggcggcagatgtggctctggacttcgacgtctgagccagtcacatcttgcagatccaggacccctcatggagcctggagagtgagggcgcacaggagtccaccctctcctgctccccacgctcccttcttggtgcctgttctgttgtgagtggtgctatttgcctgcctccagtctctgttccctctacatattttattttattattattttttttgagacagagtctcactctgttgcccaggctggagtgcaatggtgcaatctcagctcactgcaaactccgcttctcgggttcaagggattctcctgcctcagccttctgagtagttgggattagaggcgccagccaccacacctggctaatttttgtatttttagtagagatagggtttcaccatgttggccaggctgctcttgaactcctgagctcaagtgatccacctgcctcggcctcccaaagtgctggggttaacaggcatgagccactgaacctggcctctgttccccctacataaatgggtaagagaaaccttccagaaaacctctcctggctgggcagtgcaggggaagagaaccctggcctgccctctgccaaagctgggcactagccacaggactttggcacgtcccctaacctctctgagcctttgtttccttatctgagaatcagggcgtcagcagcctcatcttgaccacatcagagggtagttacaaagattacacaggccaaggctcatctccgaaagctattcctcatgctcactctcctaaccaggttttgtcaacactcagtccctttgcactatactagatcttgatctcaggaactgtttcccattccccaggaagggcttcatgggccccacttgaggcccccttaaccaggagggcagctccctgaaggtgggacagggtgcccgccaccctgtctgatacgtgctttgcagataaggtggctcaccccatctgaccagctgccaccagctcctttgtaagggagatggggaagggggaggaacccagtgatatagctgcccaagcttctttcaccaaacaaaggctacgcggacccccccgccccgccaaatgtcccaggggtttaacctttccctcccccaacccccctgtcccccatctccccatccctgttcacctacattcagcagctggttggcctccttgctggcttggttgaccccattatgagcattctgcagctccttcccggcctggccagcagcatggtgggcaccttggccaagcttctccacttcctttccagcctggtcagcagcatggttgaccccttggccaagtttctctgcttccttcccagcctggtggaccccagtgtggaacccttggaccgctttgtctgcttccttcccggcctgttcaagggtatggtgaactccctggccaaactgccctgcctccttcccggcctcgtggaccccaggttggacaccatgaactgctatgtctccctctttcccagcctgccctgctgtgtggtgaatgtcgtggccaaactgccccgcctcccttccagcctgactaacgccatgatggaggccttggaccactctgtcttcctccttccccacctgcgaggcagcatggtggacaccctggccaaacttctctgcttccttccaggcctcattaaccccatggtggaccccatggccgagcttctctgtttccttcccaaactgactggcagcatggtggaccccctggccaaacttctctgtctccttccagccctcactgagaccatggtggaccccctggccaaacctcccagcctcatttccggcctgccccgcagcatggtgggccccctggccaaatctccctgcctcatttccggcctgccccgcagcatggtgggccccctggccaaacttctctgcctccttcccaacctgaccagcagtatggtggaccccctggccaaacttctctgtctccttccagccctcactgagaccatggtggaccccctggccaaatctccctgcctcatttccggcctgccccgcagcatggtgggccccctggccaaacttctctgcctccttcccaacctgaccggcagcatggtggatcccctggccaaacttctctgtctccttccagccctcactgagaccatggtgggccccctggccaaatctcccagcctcatttccggcctgccctgcagcatggtggactccctggccaaacctcccagcctcatttccggcctgccctgcagcatggtggactccctggccaaacctcccagcctcatttccagcctgccctgcagcattgtcgactccctggccaaacttccctgcctcacttcccgcctggttggccccgtgatggaccccatgatggatcagtttgtctgcctccttcccaacctgtccagcagcgttgttgaccccatggccaagcttctctgcttcctttcctgcttgtccaataccatggttgatctcatgggcaaccttgtccatgccgtggttgagcccctggacgcctttgtccaactccttgccggtgtggctccccatgttgctaagtccgttgaaaaccttctccacttcccttccggcatgcgtgattccactgttgatgccatccagggccttgcccacctctctctctgcattgctcagccctcggttgatcccttcaatgaccttctcaatggggtcatcgctggccgcccatccagacagggcccccagtagcagaaggagggagcaggagccgaccagacgtgcaagatgcatattgctgggaaggtcgggaaggatgcagagaggagccagggaagccacgctgctatttatcctctctccctctcgccctcttctccacccctcatgactcaattacccctgtgaggcactgagttggtcttcagtcaaggaggtgtttcccagggagatttggagttgagcaatggagaggaggaggaagagagggtgagtcatggatggagaagaactctggcatctttgctccttgccctccaccccagagatgggtgtctgcccttccaaccacctcctctttcattcctcacccactgtccaggcctcctctctcgcaaacccaccttccaccatgctccatccctgggatgcaggcaattcttcaacacctcactcctctcaggcatctaagcctccagctccccaggcagtgaggggctagaatgatgggaggcaccgtctggagaggggagaacactaggtgggatgaaggagtcatcagacctcgttcttgtgggccagcccctgccctcactcattccattccagccacacaggccttctccctgttccacaaacacaccaagctcattcctgctgcagggcctttgcacatgctcctctctctgcctggaatgcagaacccagatcttcacgtggctggctcctcctcatccgtacttgacttaaatgccaacttcgcaagaaaacctctcctgaccataacatggcattaattatactctgtagtatcacccttttgttttcacagaaaaaaaaaatctgaaattacctttattttttattgcctgtctcacctactagcaatgtaaattggtcgtgttgatcactgctgtattcctagcttcttgaacactgcctggggttcagtaaatatttattgactggacaaatggatggattcgaacaggccaaggaaagagactccgagcccgagtctgggtctcacagggtgctggagggaagggcgcctgggtcgccagggcagcatagagtcccttgtggagtgccgcagattttggaggcaggatcccattcctgtcgcagaacccagacctcctgcctcccagcccttgggcaagggcagggggctgattgccacgagctggaacaggacgcagtgtctcctgaaaagccggttgaggcagccacggggaggggccgaagacccagggcagcaggagcctgtgagccagaacctgggctggggccaggccctcatccttcctgccctcccgacatggggcctcctaagccccaacctgaagccccaagtgttgacatattggctcgggttggaggggaaacagctgagagtctggcctcaggcatgaaaagggcatcggaaggaagggcaggtggtggtgggcaggcttggggcagcagatgcatctagaagccagttgggagggaggctaagaccagaacgagagccagtgggtgggtacagtaggtgcaggggtgaaagatatttgggttttggtgccaaggggagagactgagagaggggtggaggtgggattgctggtgggaaggccaggcaggaacaatgtgcagggtgtgagcagctggaggtggcagagctatgtgtgtgggtgcccaggtgtggcgagaatctgcacgtgttttcaggctttgctcaaacaaaggcgccaaggcccactcccctcagaggacccggggttcctctccagctcctggacacttgactccacccaaagacaggcatcccaggacagatatccagaagcttctgccttctctgggctctgcctatagagggtgactaagtgtgccacctctccaagcttgagctcatcaaatctgtttcccggtttcacactccagggacaaagccaaattcctgggcaaactcaggtgtggtttttctgccctggtccagggccgaaatgatggagtttcccataccaggaggtggctgggcagagaagagtgggtgatgagtgtcagaatcctaacccacccagagatcaagaggtgggatttctcccactttgaactgtgttccatcttctttttgtgtttttggagggagagtctcactctatcccccaggctggcatgcagtggcatgatctcggctcactgcaacctccgcctcccgggttcaagtgattcttctgcctcagcctcccgagtagctgggattagccgggcacctgccatgatgcccagctaatttttgtactttcagtagagacggggtttcaccatgttggccaggctggtctcgaacccctgacctcaggtgatccgcccacctcggcctccccaagggcagggattacaggcgtgagccactgtgcctggcctgaactgtgttccatcttctctatccctctccaccccatcctttcatcttctgccagcctcagtccctctcctctgtctctctattcccatgtggcacgattcgattcaggacttcagcatctggctccataactgagaatggcctggagttgtcctttctttattttatttattttttttatgaagtatcactctgttgcccaggttggagtgcagtggcaatctcggctcactgcaacctccgcctcccaggttcaagtgattcgcctgcctcagcctcccgagtagctaggattacagatgcatgccactacacctggctaatttttgtatttttagtagagatggagtttcaccatgttggccaggctggtctcaaactcctgacctcaggtggtctacctgcctcggcctcccaaagtgctgggattacatgtgtgagccactgcacccagccaaaatcagccccttttgaatcctggttttgttgaggttatatttttcacctccttgattgtacaccaaaatgtagctccctttgtttaattaatcatctgtgttttggtctcggttcgttaaaacctcctcacctgtacacttagtttactttcttctcccaggccatcaaagcaggagagcctcaccctgccctggtcccatggcaggtgcttggcaaatgaatttctcatggatgttggcggaaggaagaggttatgtcattctgccccttcttgcatccatccctctctgggatggtgactccttcctggcacaaacccccactccccctgaaccttggtcacagctgcgtgtcaacctgctgtgcaggtgatggtgcctgcctgtgagtcactgaggtgcaagcaaacccctaccccggggctgcaggggagggagctgtttgtccacttgttctttgtcagacgttcattgaaaacctgctttgtattgttctaagtgctggaggcacagtcgtgaacaaacaaacaagaacaggagccctgtgaggggcttagagcccaagggggagacatcgaacaaataaaccaatcagtagatcatgacaaactacatgaaaagctacaaggaaaagaatgggtgctgcgagaagatataacgtgaagagtttgataagattggcgatcagggccgggcgaggtggttcacgcctgtaatcccaccactttgggaggccgaggcagatggatcacctgaggtcaggagtttgagatcagcctggccaacatggtgaaaccccgtctctactaaaaatacaaaaacaaaaaaaaaattagctaggtgtagtggcgcacgcctgtagtcccagctactcaggaggctgaggcgggagaatcacttgaacccaggaggcggaggttgcggtgagctgagatcgcaccattgcactccagcctaggcaacaagagcgaaactctgtctcaaaaaaaagaaaagaaaagaaaagattagcgatcagatgaaacctgaggaattgacatttattcattcaggtatagtttattgggctaacgcctttttcagacagggtcttgctctgtctcccagctggagtgcagtgacacaatcacagctcactgcagccttgacctcctaggctcaagtgatcctcccacctcagcctccctaataattgggacaacaggcatgcaccaccacacctggctactttttttattttttgtagatacagggttttgccacattgcccatgttggtctcaaactcctggactcaaatgatcctcccacctcagcctcccaaagtgttgggattacaggcatgagccactgcgtccagcccacaaacacctttcaggtgccaaacacttttcttgtcaatgggatacagaagtgacatagatgacgtccctgtcctctcagagcttacagtctggtggacagagacagttggcaagaaaacaaacaatttttagagagacatgtgctctaaggaaaataaaaacatagacagtgtagccctagagaaattttgcacactgaagcataactcagaatggagaagtcagacaaggcttcctggaagatgggcagaaattgggaagggggtgacggctgacagtgacagagaaaggagggaacttagatgcagagtgtagaaagcctctcttaaagggtgggaaaccaagaggcagccaagggaagccctgggtgggccttccaggcatacggaggcagcaagagtcactccactggagaatccaagggacagcatggaacctgtgtgcttcaagagacagagaagaggaaagggctttcaggaacagtgtaaaaggtgggattccaggctgggtgtggtggctcgctcctgtaatcccagcattttggaaggccgaggtgggaggatcgcttgagcccaagggttctagaccagcctgagcaaaagagtgagaccctctctctacaaaaaaataaaaagtaaaaatagcctgcagtggtggctgcacatgtagtcc[134 bp omitted]ataattttaaaaagtgggattccattccagacggcagtgcgtggccgtggaacggtgatgcatagcgtgctgacgtcccatgcctctacggggatgggatgcgatggtgtcaggcctctggcttgggcgccgcccctcggcgacgtcactgggtactgtgacgtcactgggtgctgtgacatcagggcaattagcccaggacccacagccctggcgctccgcacgcacctcggtaacatcacagcaggtccaggccaatgataaccttataagaggccatgtcgaagcgcgacatcgtcctcaccaatgtcaccgttgtccagttgctgcgacagccgtgcccgggtgagggaggcagcggagggcgcgggggaggggtggaaagggtagtggggagcgtctgcaccctcacacctgtgccgtatccctaccgcccttcctggcgtgtgcaccatctagggaccaggggatcagccgctctccctccctccacacccgccagtgtgctggcagagtggggtttactgccatggcggggagaccgggcctccgcccccagggctgggtgggcttcgcgccgctatcacgcggtagaaagagcagaaacgagggccatcggaggctgcagcctgaaagtggcgggaagtgggcgggcttaggaggggcttagggagaacccaggggtgctgggcttccatgtaaaagtgatgttcatggcgcttcgcgtgaggtgagctttgccctccctgtgatgcacaaaacaaggacacttggaaccttgccggggacgtgctgaccacttcgcaggcgagagctcagggaagcctcaccaccacctgagaaggccagagtgtgcccgcagtttacagagcggccaacagaggttaagagagggcaaactacttccttagtctctcaacaagggcggcgcgcccgcgcgcgcgcacacacacacacacacactcactcactcactctagccggaggaaccaggtcttccggtgggctgcctccattcccacactgttccctcacttcccaagggcgggggccgcaggggtaggtggggctggggctttggtccaggagaccctggaagacacaggagcagacaggcttaccagcctcatgagacttgaacccctgccctgcgcatcactgctccgtggcctcaggcttcattttcccctctgtaaagtgggtttatagcgcatgcctctcgggattcagtgggaggacgcagtgaggagctgggggcagcacccagctagcccccaggcttttctccaaccgggggaccccacccctacagtggaggggaagagagtgcaaggctgggagtgctgggagaggaggaccatctgagttttcttcggaagggtcacccattgggctcagattcccacctgaaccaggtggacaaatcccctttctcccatagcagaaacaacccccaaggatgcaaacatcctcaagttcaccaataaacactaacaccttcatgaacttggacagccactggaaacacctatagtccagcctcaggccacaaggtctgtggcaacagggagaggtcagggagacagacaggccagctggcccccggctcccagccccaccaccccccaggtgcctttgatttggtgccaaaaacttggactcccactacccccttccagcccttctccaccccctgctgtctccctttcctcaggaatctgtgtaggatcagacttccctcctctattaaaatcagctcctatgtgtgggcctcgagatctcactgcgccctcacagcagcccctaggtgggggatcagccccaagaggttcattaacttgctcaaatccacagagcagcaggtctgtgtggactgagccaggcttgactttccagcttgaaactctctgccaccaggtcccctgagtctccacttctcccctcttctcaagccctcctctgtagctcaggcggctgctacctccaggcgcaggtgtttttaagtgcagtctgggagcaggagtgtgtgtggagaggtgggagccaatgtgagcttccatgggtttcacagagtatgatacacggtactctctaagcttccctgaggataagaaatgcctggagtgcttattttattttttatttttttttgggagatggagtttcgctcttgttgcccaggctggagtgcagtggcacgatctcgcccaccacaacctccgcctcctgggttcaagcgattctcctgcttcagcctcctgagtagctgggattacaagcatgtgccaccacgcctggctaatttttttgtatttttagtagagacggggtttctgcatg[139 bp omitted]acccactgagtccgatttttctaggaagagccctcctcaggtgatttttttttttttttgagacagagtctcactctgtcgcccaggctggagtgcagtggcgcaatctcggctcactgcaccctccgcctcccaggttcaagagattctcttgcctcagccccccgaggagctgggattacagtatttttagtagagaacaggtttctccatgttggccaagctggtcttgaactcctgacctcaagtgatccacccaccttggcctcccaaagtgccaggattacaggtgtgagccaccacgcctggccactccgacgactcctatcatggaacagtttggggaccactgggctaaatcaattattggacaaattcggggaacaatctacaaaatactaatgcatgtcaaacatttcctcggcttggtcataagcaatccatgtattacctcatttaatcctcacaacaaccctctaagaaaagtactattatctccccttacagaggaggaaactgaggcacagagaatgtcaccccaagcgatctatgttgaaagtacataccccggccaggcgcagtggctcacacctgtaatcccagcactttgggaggctgaggcgggtggatcacctaaggtcaggagttcgagaccagcctggccaagtgaaaccctgtatctactaaaaatacaaaaattagccaggcaccttggcgggtgcttataatcccagctactcgggaggctgaggcaggagaatcacttgaacccaggaggcggaggttgcagtaagccaagatcagtccactgcactccagcctgggtgacagagcaatactctgtctcgggaaaaaaaaaacaacggaagtacataaccagtgaattagaatctccaggaaagagcccttgggattgacattttaaacaagttcattctgtagagaaagtgggtttgggaaacactgggctaaatggttggtcacgaggggccaggagccagcaacagattctgggcagcaaagacagtttgttctctttcactttggtggtcatgcaacccattccctcccttcccccgcatagtgaccagagcaccgcccccacctgagcctaaggctgaagtagagccccagccacaaccagagcccacaccagtcagggaggaaataaagccaccaccgccaccactgcctcctcaccccgctactcctcctcctaagatggtgtctgtggcccgggagctgactgtgggcatcaatgggtgagtctactccagcccctgatcagtctgaagccttagagcccagcccctcctctggctgctaactgggggcacctccacatttccccccatcaatgctttcgttccgacgaccctggagaaatagcccggagcaaggcagacagggccccatgctcagcagcatgctggtggggaagacagtaatcaaataaagaaattagattgttcagtagagtgtgctgggaacagtgtagaatccagtggaaaagtcaggctggagagggcagcctttgccagtgatcagggaaggccttggggagaaggtgtcattggagcgggaccagagtgatgagacacagccagctcccagggcaccttgctggggaaggagtcttccaggcagcgggacaagcaatgattctggggcagaggcgagctcagtatgttcagggacagccaggaagtcagagtggctggtgtccaccaagcaaagggaaaaggagggaggccagtgagaagcccggagggggctgctacaccacagtaaggagtgtggatcttgttttactgatggacagtcgtggatgttttcatgccaagagacgtaatctgtcttgaagttttaagatccatccaggctctcacacctgtaaacccagcactttgggaggccaaggtaggagaatcctttgagaccaggagtttgagaccagcgtgggcaacatagcgagactctgtctctacagaaaaaaattgttttaattgtttaatgaaaaaataa[136 bp omitted]acatggcaaaaccccgtctctattaaaaatacaaaaattagccaggtgtggtggtacgcgcctgtagtcccagctacttgggaggctgaggcaggagaatcacttgaacccaggaggcagaggttgcaatgagcccagatagcgccactgcactccagcctgggcgaaagagctggattccatctcaaaatatatatatatatatatgtatatatgggttagggaacggattgggagagggagctgaaaaagcagttaaaggggctggtgaggtcatcttggcaagagatgcccatggccagcacagaggttgttgccttcttcccctggattaaggattcccaaccaggctccttgagggagcctcctctccattacccccttctctcccatcccttcctgtctgtccctggccagatttggacgcatcggtcgcctggtcctgcgcgcctgcatggagaagggtgttaaggtggtggctgtgaatgatccattcattgacccggaatacatggtcagtagctggcagagggcaggaacagcagggtgggactggggtgggaaagggactcagggaagctgtatggaaggctctcagctgtaatgtgagaccttcaccaaagaggggactctctagggatcctcaccctgccaccccaagactaggagccattccatcccccacaggtgtacatgtttaagtatgactccacccacggccgatacaagggaagtgtggaattcaggaatggacaactggtcgtggacaaccatgagatctctgtctaccagtggtaaggaaagcatctgtctgatgcacggctgtgacatattgaggcagggcatgtggaggtggctaaaatgggattccagcctctcacatggggtgctgaaaccacccccaaaattgcgtgtgcatgcctctaggtactaatttgaagagggaagtctcaggtccttcacccctaaaatgattaagaagcactaatctaaaaagatgcctcactgtactgaagaatgctttttctttatattttttttagggacggggtatcactcttttgcccagtctggagtgcagtggtgtaatcatagctcaccgcatccttgacctcccgggctcaagtggtcctcccacctcggcctcccaagtagtgggcaccagccaccacacctggcaaattttttgtagagatgaggtcttgccatctggcccaggctggtctcaaactcctggccccaagcaatcctcccaccttggcctcccagagtgctgggattacaggcaggagccactgcattttgctttaacgcacatttgcatgttttctcgtgggcatatcaacatgtccagaactcaactcttgattccccttcaacccacacctattcagctcccattgaccactgctggtcaactatgcctgaattccaaagggaggaaggtataatgaggcttgtgcgaacatccgaacatccgttcccatcatggcctgaaccagtgtttcagttttactttagaatgccctgggccgagagaagggctacattcagttagttgggggagtttagaattttatttttggctgacattcacctttctaatgtaaactattagcgactcctggctctgtggctgcctggggcttttacacatacacacccacaggcccacacacatgcaaatacacacaggcacactagtgaaccctgtctgggcccaggcagggtctgcagcctccccagcgcccctccccacagatctaatctcagcccttctccttgtacttactgggggtagggtgagtgataaaggggcagggatgggtgcaggaagtttgtgggcagggggcagagactggagagtcagtgaaaattgaagaaagctgcttaacccaagtttgaaatcatgacactagaaacaactccagcaccatagttatcacgcagacttcaacgtggccaccaccattaccgccacttggagtcatccctcttccccacctagctgccccctccgtccacggtcccgactcaggtcttgccttctctggtcacttgtgcaatgcagttccccgcccctccagccccctctccatccccgcactgttgggctgcacaagccaggctgtgtgcctgcactctgccctgcacctccgctagctagctgggtgaccttgggcaaggaaccaaacttgcctgagcctcagttccccgctgtatctgatggggatgatgagcaaacccaccacagcggtagctgggagcacgaatggagtgaacatgtgtttgtggacacttaaacgggcacttcccacaaggccatggccttgcacggagggctctgtcaactggtaccaccactgttgctctggcattagcaggtacaggccctgatagccattcagaacttcctttgaatgaatgaatggaatcctcaaaacagcctggtgggcaggaggctggggcccatgacagccttggggagggcctggggtcttctgggggcacagtctttgcctcaggccaactcagcaattgttgcagaggaatcgcaagtgtccctaatttggaaggcaggaaatggggggtatctgagaagagctcgttgggccagatgatggaaagtggactgacagagcaggagacaggaagaggataaccatgcatgtgtgatggctttgcagggcagcccattcattcattcattcaggcagtggaaacaggagtgcagacccgaggtgggaccagccacctgcactccagcaggctctccctctcactcccctcccctctgccctgacagcagtaaaaaaatgcaaaaaatgacagcggtagcacttcctcatcgggttgtgaaggttacatgagtttaatgcaggtaaggcacttagaatatgggcacaggacaggtgttcagtaaacacgtataaaatggctaactaaaaaaaaaacacgaggccaggtgcagaggctcatgcctgtcatcccagcactttgggaggctgaagtggggatcacctgaggtcaggagtttgagaccagcctggccaacagagcaaaccccgtcaccactaaaaatacaaaaaacaacaacaataaaaaactagccaggtgtggtagcgcatgcctgtaaccccaactactcgggaggcggaggcaggagaatcgcttgaacccggaaggtggaggttgcagtgagccaaaatcgtgccactgcactccagcctgagtgacagagtgagactctgtctcaaaaacaaaacaaaacaaaacaaagaaaacccatgaggccaggcacggtggctcacacctgtaatcccagcactgtgggaggtcaaggatcacttgagcccaggggttctaaagcaccctgggcaacaaaagtgagaccccatctctacaaaaaaatttaaaaattagcttggcatggtggtgtgcgcctgtagtcccagctactcgggaggccaaggcaggaggatggccggagccaggaagatcaaggctgcagtgagctctgattgcaccactgcactccagcctgggcgacagaggaagaccctgtctcaaaacaaacaaaccccacaaacattgattgaaccccccattgaggggagcaggctcaatggcaaaggaaacagaccgacactggccaagaatcacagaagcaaagcacccggttactcatgataaacctgggaaggaagaaagtggaacagtttattcacttaatgcttgtttgctaaagccaagtagaaaacggcaatactagatgtttagtgtgcttcaaatacaaatgtttgtcaaaataccaagtaaaaacataaatttataaaacaggaaaccagaaacctcccttacctttccaatgtaaaccatgagccactgctgccccaaggctgcctcaggcttcaggagtcctccaggagctttttctttaatgcagtgtctgttttcagggaccctcctggcctttggcagccagcttcctattgcaggagctgagggtctaggagggttcatggcgaggttgtcagagctgggaagcagaaagcagccgggcaggcctcacagtcacagagtccacgtcccgggcagcatatggagaaagggtctgggctggctgacagcagtcagcattggcgcctctgaggaggttgagggctgagttggggaggtcaccacctgtacccaggcataacaggggtggtgcaatcagcaaagggaaagtggtctgaagtggggcagtggtgaaaagctaggccagcggggtggagcccatctggaacaagtaggtgtgtggggtaggggacgcaggtggttgcaggtgggccggtacctgctcagcctgtcaaatggtgaaagccatggactatgaaggtggggctcaagcaggggagactgactcagccctgccacttccccacagcaaagagcccaaacagatcccctggagggctgtcgggagcccctacgtggtggagtccacaggcgtgtacctctccatacaggcagcttcggtaagctggggagaggtgcccagggctagctggggggatgatggtgccagaagcccctgacacctgcgcttcctccccaggaccacatctctgcaggtgctcaacgtgtggtcatctccgcgccctcaccggatgcaccaatgttcgtcatgggtgtcaatgaaaatgactataaccctggctccatgaacattgtgaggtaatgtgggcagtgacatcctgcaatgtgtggaagggagggtagactcgtcctccccaccctcagccccactggattcctggtcgcttggcttctgcttctccttcccgaaactatctgctaaaaacgcatgacttccagaggacaagcttggggagcctccccagctgcacctcagtgcctccttcagtctgacagtgtccccacagatccctctcaccctcatcctgacgtttcataaaaccaagtctgcgtgcataccccaagaggggtaagggtggaggggtggctctgcgactcacctcacagtgtccgtgcacaccttggctgtttcagcaacgcgtcctgcaccaccaactgtttggctcccctcgccaaagtcatccacgagcgatttgggatcgtggaagggttgatggtgagttgaggatgaggggctggggcaggaaggatggcagggaaacccaacttcttcccgggccttgcttactgtatggagttaagagggagagactggtttcgggaggagaggcccaccagtgcagaagtcacttaaaacactgtgcaaccctcaggcaaggctggaccctggcctgcacacatcccctcctgtggtctgtggtggtggccccaccagcctccacacctaggccaccaacttagtcctggaaaaaagaggcatgggagcttaggagcatgaaggcctcatcttggtccttctcttccccaagaccacagtccattcctacacggccacccagaagacagtggacgggccatcaaggaaggcctggcgagatgggcggggtgcccaccagaacatcatcccagcctccactggggctgcgaaagctgtgaccaaagtcatcccagagctcaaagggtatgaggacaagaagctgcaaccagggtgggggcatacgccaggaggactggactggcccggccctcagtccttaagaggaaagcaggggcctggcccagccacagggaaagggggaatggagggcaacgtccctaagttctgactcctgttcctcatgggggattctccaggaagctgacagggatggcgttccgggtaccaaccccggatgtgtctgtcgtggacctgacctgccgcctcgcccagcctgccccctactcagccatcaaggaggctgtaaaagcagcagccaaggggcccatggctggcatccttgcctacaccgaggatgaggtaggggctgaggagaggagaccctgggaggagccctctgggaagggacatgatttccacttgccagggagctgctctcaatgtgccaagtcagaaactgcagggcaggaagggagatctccctgcctcagggcctttgcacttgctgttcctttagtctggaatgcttcccttgccaggtgaccatacagtctgtccttacttcctccaagtctctggaggaacctccctcttcagcaaggcaccccctcaaaatatgttctttttgtggccatattcctcacctgaaatttcatttcatagtcactgttggccccagtggtgtgtgcactccaagaaaacagggatttaggggctgccttttcacttttgtggctccaacctggcatacagcaggtgactaatacatgcttagtgaacaaaagacaacagctcccatttttttcaatacttgctcagggccaggccatggccagatgccttctctgtgaggagtggatgccatggtcatggtggacccctgtacatccaccttggtgctgtctccctgcattaactcctgcaggtccactttcccacagtcactgggatcttttgttttaatggaatcacattgcatcacccgttttcaggattgaaaacactcctgtggcctttcatgacactagggctaaaaccctcaggtcctcccttcctgcagctccttctacctcagacactgtgctgagggccccagccggtcagatctttctagtcatctagacccaggctcatggccacccctcagagaggccctccatgctggcccattccaaacgcttgcattattcctaggaaagggatgtactggtacagcatgagggtgtttgtgacctgtgccctttggccagaccctgacacagtgccttggtcataccctgcacttggtcataccctccagtccagagactggacacagtagggctacatcaaatattatagatgaatgcatggatgggcgatagagttaagagtcggggcctcagctcctggaggtccttgctctgccggacacacttatctttgaaattctgacttccaggtcgtctctacggacttcctcggtgatacccactcgtccatcttcgatgctaaggccggcattgcgctcaatgacaatttcgtgaagctcatttcatggtaagggggaaggagctggagacttagagggaggggaactaaggggtggtcggaaggaacccccttgaacctcccgacccctcctccacaggtacgacaacgaatatggctacagtcaccgggtggtcgacctcctccgctacatgttcagccgagacaagtgaaacgggaaggtcctttctttccttcccaggggccggggccggaacatgtgcctcccgttccagcatctggctgcccgggggaggaaggacacccggggcgggcgccccacgccgatgggtccatggtgaaataaaaaacagtgctcacggctgcgtcccgtatctctgcgccggtcagggcgggttctgatccgggtttgaggcccgccccacccttactcgatcgcctgcgcccacgggcgaggggtcgcgctcgactccaagccgggttccacttcaggagaccgggaccgcgatggcagcggtagaggccccgcatggccggaagtcactccccaaagcgctgggccggcagcggtgggacccagggccggccacgggctctctgacgtcactgggcgcgacgccccgcgccgggactactgctcccagaaggtcgcgcgcgggcccccgccagtcaggtgggtgccaggccctggccgtggcgaaagagccggcggagccggagacccgctcccggagacgccgcctcgcgatccccgcgcgggcgggaccgggcggccggcatcatgaccctgtttcacttcgggaactgcttcgctcttgcctacttcccctacttcatcacctacaagtgcagcggcctgtgagtgcgggaagggcgcggggcggagagggcgcggggcccgggccgaccctcacctcccgcttctccaggtccgagtacaacgccttctggaaatgcgtccaggctggagtcacctacctctttgtccaactctgcaaggtgagggccaccgggaagccacgtgttctggcccccaggctctgcagacccagggacccgcccccgttgcctatccgcgcccccgccgccccacggtgggaccgccctcgggactccgcactgggaggcgtcaggatacctagagaggatggactttaaagagggcacgacctgagaagagacctagaagcaacttttgcgtagcacttagtaaaactgagaaaacctcagtagtgtggttggctaacaggttttttttggtgcggttaagagtgatcactgattccgtacgtgctgctaacactgcccaaggagcagcaccttcagacctgactcagatgccctgtgatcacccagaactcaaacttccagccccctcggggacccggggacctatcctctatctccccgattcctgtaattttgccaccatctggtggttcctcttccagatgggcccccagaacctgtcctgccctcttcctacccacgaacttcccacaaatcccacgtggtttatcttgatcccctcaccttgaagtgacctctttctgctttctgttctcagatgctgttcttggccactttctttcccacctgggaaggcggcatctatgacttcattggggtgagaggggccagggaagggaagggagttcaggaatggggctccctgtccccctgtgcttacttaagcctcaacctgacccgcaggagttcatgaaggccagcgtggatgtggcagacctgataggtctaaaccttgtcatgtcccggaatgccggcaagggagagtacaagatcatggttgctgccctgggctgggccactgctgagcttattatgtcccggtgcgtacagcagcctggagcccagacccctgagaagggacacctgggttccacgggggtgctggagggcaggggctcaaagcctggtgctgaaggtgtctgagtactggagaatcccatcctttgccttcctcagctgcattcccctatgggtcggagcccggggcattgagtttgactggaagtacatccagatgagcatagactccaacatcagtctggtaggcagtcgtgctctcccacatacacatttctgctggcggccatactcctccccaaggcctggccccgactttctgcctccctctaggtccattacatcgtcgcgtctgctcaggtctggatgataacacgctatgatctgtaccacaccttccggccagctgtcctcctgctgatgttcctcagtgtctacaaggcctttgttatggagtgagttgggtggggtttagggctgggtccaaagtggggtgggttatctagtctcccttccttattgtgacattttcctgcaggaccttcgtccacctctgctcgctgggcagttgggcagctctactggcccgagcagtggtaacggggctgctggccctcagcactttggccctgtatgtcgccgttgtcaatgtgcactcctaggcttggtgtctcagacattgatgtaccttttccctgcctcactccaggttttagtgaagtaaacagtatttggaaagttgttgctgcctccatttctctctcttgggaactgtctcccaataccgtgtccacctgggtctcagaggccctggttctgtctcaggagccaggtagacaagctggaagctagccagtcactgacttgtcccatgtcttgttcctcaggctcctggtttgccaggagtagacagaaggtttggatgatctttgagcagtggcagaggccagggccctcagggaacagatgatagaggggagctagaatccaagagaaggcccttggggggctcttcctcctcacagccccaacctgggcctcctcacatgggcccttcccgggctggttgcctctgaggctcctggccccagtgtccccctccaatccatcctctgtatggcagccaggggatctatctgaaacccgtctaaccaggtcatcctcccacttgcagccacttgcggccccttgttacacagtggacagtccaattgcttggcctttggttttacccaaccagcaaaaccagcttttctgaaactgctccctagaataatttgtccagccagattcttaacatcgttcaagccatggggtcagcatggggctggggggagagttgtgactgtgagctcctcagttctatggccctcagatcagatcccagcctgagccttctcagggtggagtggagagacagctgcagccaagaagcagagcagtggggcccccagcttggacattgtcctggatgcccccctccaccctcagccttccttggtccactgaagccggctccccgcctttctctgagggggatgtgtcagaagttttgaatgtcatgtttaagctccactttgatgtacaccctccccactcaggaagatgctccccatccttggtgttcccagtggggtaccccagggagtaggatagcaccattgcccctcctcctccaccaggccgttgaagttccacctgattttttttaagcttaggcctaggaaagctcactatgaccatctcgatgtttccagagggagcatttgccttcagacggcagctgccatctaggccactcttcctcattgtttggagtaaagacagggtccatgggtctcttgggagctggaagtgattgatcaccttgactttgatgtagaaaggaagtagatggggcagtctatctgggtggacttgtgacaaggtcactttctcccacacttccatgccccacatagctcttcacacatattgagacaagtgtaggatgcaaaattaccaactggaataatcccagcttacatggggttcagggagagagactggagtggctgggcctgagttggcagaggacggtgaagcctgggcggttggactgtggggagccaggcttcaggtgatcggggttatgatgggaaaaccccgggttatggggacccagaggagccgcctggcctgccgtggaagcagtgcgggctcccctgagcagaggacatgtgagctgagacctaaagaatgagtgattggggcaaggcagaggtaatggtcttgaggtcagagagggggcctgtttttcccaagggaacataactggttggaatgagttcaaggggacttgtaagactacagaagctggcaggggtcagatcacaggaggctttgggaaccaaggagagctctaggcagaggaaggacagggtcagatttggctttaggaagctctgcatggctgttgtctgaaatgggaaagctgaggccacgaggccagggctggaccagggcagggctttgtggggttaggagagtgactagaagccaagcccaggtgttggtgatcagtggctgtgtgtatttatttaccggcagggggcgctaacaggtaagggaggagcaaagagttccaggataactggagtttggggcttgtaagcccgagggctcaccacgtttccaagggagaagggaccacactgatgggacagtgggactatcagattgggtcagtgcatgggtacaggcatggggggtgatgaagaggccagtgtaggtcaccaacactgggggaagctggggacagaggtgggtctcactgcagaaacaactgaagccatgggggactggggggctgtggtcacaaggaaggagaagcccaggccctagccagagaaagccacataagaaagaggaagagaggtgaacagaggggctgggaaaggagcggcagagatgggaggtagggggatggggttaacctttcaggtgaggggtgtgaggaggggacctccaggagttgttcaggaactggccattgccgggacagaggagtaagcaggtaggctcagaaaggagacaccgctggggggtgggggatgcttgatgtggaaatgacttgggcccccttgtgtctgggagcctccaggagggagaagggtgctgagaacagagaaagcccagaggtggtagggggtgcctatcgccacggcccagcttgcgtttagatgccatgaccctgggcaaaggaataggaatcatttccccaaggcaggtttattgaggacctactatgtgccaggctgtgtactaggcactggaggtgcagccctggataaacagcccccatgtacaggactgtgggagatcacaagcactaatgagagacgctgaggacagtgcctggcaccagatacagcacagtcagcatgagctggttttattaccatcgcccaggacacaagcgtgtctttaacgaagggccctcaggcagccgtccagcctggactggagtcctaagaacagaaacaccctccagaagcggtcagctgtactccctgtcagagccccaccgccaccacaggtggcggctttcccgaggccagcccagaggactgcccaggcgctgctgctccaggaggtgcgaaccttgggaatgggggaggggagtgggcaggtccctccaagtttggggtgccgtgggctacagaagcagatactggtggggctgggactcttggttgctcagatatcttggtggctgtccagagggtcccacgagccctgcccccacctgctgtggcagttgcagggatgcttgaaggcagtcgtccctctaatagtagagttcctggtcccaccagcctgggagagagagggagaaaggagactcagtgctgggggtgccacttaggcagggccaggggctcagaggtcagtgctggttgctatggagggtcaagggcttagaggccaagtgttgaggatcaaaggtgggtgcagctgctcaaacgtttcagtcccctgcccccaggctcccagtctccacactcactccctgggcaacagcgaactccaagcttccggatctcatcatagacgaagatgaggatgccgtagggcagggggaccagccaccactggaacctgaaggcacatggcaaggtgaaggccatcccaggcctgtgccctacagccccctccctgtccttgcccctcacagcctctcaccgaatgggcatgaagttgaagatgttgggcatgccggggcagtagcacaggaagcagccgatgcagacctggaacacgatggcgatcaccaggatcttattcctgggggtgggcagaatgggacaggccattaggaattggggacgtgatggaaatcaggatactgtgggtcaaagtaggtcagatgtcagcagcagcagggaggtgttctacacactgaacactggagtggcccgggcctctcagcaccacccctttagtgaaatgtggagggggccgtggggggagttattggccagttagaaaggtttttttggcatgtcaccatctggcactggcacccgctggcatttgccggctgttctaaaccacagtcaggatctgatgggagttgggaccaggggttggagggcaggaagagggccagccagggacacctgaagaagccttgctggaaggcagagagacggcgcgtcttgcggatgaggacatcggcgatctggcacacctcaatgctgatgaagaacacggtgtagcaggtgtactgctggtacaggcgctgcccgaatgtctgcaggccaggggcaaacggaaacagcctgagtccagcctgagtcccggcggagagcctctgcagcccaccgggcatagggtcccagggccgtgaacccctaaatgctctctctgccttgcatcagagtgtgggggtggggggaaggagagaggcagggtctgccaggtgtgcaggaccccagaacgtggggcccagaaacctcagcctagcagagcttggatgacagtggccgggaaaactgtaggctgggccgactgctttcatagtgaaaggggggaggcacccaaaagaaagggcctgggaaaggggaattgaaatcctcagatgggatttgcaaagtccagtgactccaggggccaggcagatggcaaaaataggtgaggcagtcaccgcgggcctttgggaaaagagggcagatgccccatttaaagggggcagccactatgcagcccatttcttcaacacagctacttttttttttgagatggaatctcgctctgtcacccaggctggagtgcagtggtgcaatctcagctcactgcaacttccgaatcccaggttcaggagattctcctgccttagcctcccaagtagctggaattacaagcatgtgccaccatgcctggcaacacaactcctaataccagctaactgtggggatcactgactgctccaggtgccgagtgttgcacgtgcattagctcatttaatccgctgggtaaccctaggaggtaaatcagtggtgctggaacttgaacatgcatgagaatcccagcaagggctcccagagggctgggatagagcctgagaatttgcactgcaaacatgttcccaggagatggtgatgctgctggtctgggagcaaactgaaaaccactgaggtagactttgatattctctccactttgcaggtgagaaaacaggcacagagaggcaaagcaacctgcccagggttacacagcttgtgagaagcagtaccagaccataagtccaggcagtctggcttcagtgtctaccttaaccatgatagtaaatgtttaagggaagtatcctcgtctgtatgtaactctacaggtgaactaaacacatctgctggccagatctagcctcactgtgctccaaaccttcattaaaatagaccacatgtgcaaataccctgtgggagtgatgctgtagggaaaatagcagaataggggcctggttccacatctgagatgatgcattagtgtcagggcagagacacccatctgcagttgcgatcatcagaagcaggagtttggagctggagatggtgggaaaggcccttgcccccccgaactggcagggagtctgggggtccgggatgctctggctgaactcagtcacacgtggaggaacaagtgggccgcacacaaggcaagttgccctgggaaggagggagcccagggatgggatggggcggggcagggctcacccactcctggccgtagctgtcctgcagatcttgtaggtggtggtcctcccactgcgcccgcagccccacgcacagcagtgggaaccagccctcctgggccattgccgtgaagtagtcagtgaagccagcaaaggactgaatggcacctggagagagacaaggggacacagggagacagagatggacacagagacagggacacaggaagagagggacatggagagacagggacacagatacacaaaggtcaaggacacacagacagggacacgggaagagagacagggacacagatacacaaggtcaaggacacacagagccagggacacagaaacagtgacagagacacagaggcagagagagaagcagggacagagagacagaggcagggacagagagaaaaagacacatccaggacccaaaaagacagaaataggcaacaactcagagacagggtcatggagagcaaggtcagagagagagcagggacacagcagaaccagagagactgtcacaaacagagagggacacggaggacaacggagacccaggaccaaatgcagacactgaggtccagaaccagccggagcccaaggcagggcctggggcaggcgagcagcccagcgcagagccccccacctccaggctccccggcccacgggcacccaccaatctggaagtaggagtaggcagccaggggctcgttgaccaatctgtcacgctttgggttgcgtggacgcaggtgcatgatgtcactctcggccttttcatatgccagggacacagatgggaactggccaggagtggaaggaactgggactgagggtttggctgggcccttgtcccctccacttcgggtcccccttcccccacttgtgagcaggaacaggactgaggttagcaggcaggacctgcagggacggcacagccacaccagcctggacagcctgggccccactggcccctgggtgttggcatcctggtgcccatcttcgtaagaacatctgcttttatcttctccctctgtctccctccctctctttctctgttcctcactctgtttctctgtccctgtctccagtgtaattctctgtgactgtatctgctcttgtgtatttctgtgtcactccctatctctgtgtatcttcagtctctcagtgtcgccgtgccccttcatctgcttgtgcctagagtggcagcagagcatactgaccacgaccacaggctgtgggacctgtgactgctcaagctcaagtcacagccgggccacttatttgcccagtgacctgggacaatccactctacctgtctatgccttgatgagctcatcagtaaagtacgggtgatagtaacaaaactcatctcatagtgtggttatgagtacaaaattaaggaaatgatggtgtgtctggcccagagaaagcactgtgtaaatgttaccgaataaatacctgtcaacacagctgcgcctctggctgcattcgtgactgtatctgtggttcttttctgtctgtctgccatggggtctatctgagggggtttatttgtccgtgtctgtttaggggcacgtgtctgtgattcaagtttggccagatacctgttctgtttccatctctgtctgagtatctgtatctgagtcatgtgtgtgcatgggtcggcccgggcctacctgagtgtccgcctgtgtgtgcatggctgtatgtccatttaggtctgttcacctgcctgccacccatgtgtcctgcactggctgtcattgcacacacaggtcttgtctgtcactctgtgcccaagagtgtctgtggtggtctctgtccctcctgtccatctgcaagcaagtgtctctgggcaccctgtggatgggtaccctgggctgtggacttacaatgtcagtgcagagttcgatgaagaggatggtgatgcacccgaggggcaggggcacgctgacggtgatgtagatgaggtagggtgtcagctctgggatgttcttggtcaatgtgtaggcaatagacttcttcaggttgtcgaagatcagtcgacctgtggggtagggtgggcacctcagcctcctcacagccctctccctcctgtgcccacactgcctgccctccccctggcgtggctcggaccctgctccacgcctgtcacaatggaggcaaagttgtcatccagcaggatcatgtcagctgcatttttggcagcatctgagccagcgatgcccatggctactccgatgtctgccttcttcagagctggggagtcattcacaccatcccccgtgacggccacaatcgcaccctgcaggcagtgggtgcaggtggtgggtgggtggtcagtgagaggccggtccaagaccagccccgcctgtctgcccgcctgcccaccctcatcagcagggctcaccagccgctggcagctctccacgatcaccagcttctgctgggggctggtgcgcgcaaacaccatctcggggtgggtgcgcagggcctcgaccagttccgatgggtccatgtccttcagctgcatgccattgatcacacaggcacgggcatccctggggaggagatgggaggacctcgctgggacctcggtctgtgccagatgtggggagaaccccggggaggtctgggggggcttacttgcgattaacctggtctacgggcacacggaggcgggcagcgatgtcctccactgtctcgctgccttccgagatgatgcccacactggctgcaatggccttggcggtgatggggtggtcacccgttaccatgatcacctgtagggggaaccagtggatcactgaccccttcagatcagcccaatctccctgtcctccctgggagacatctgctgatacacgtgttcatttacttgaccaagcgtgaccacctcctacgtgcctgggatatagcagagacaaaagagacaaaaatccctgtccttgaggagctctagtgagggtgacagaaaataaagaaacgaattatatagtgtgttagaaagtggaaaaaaacatattaagcttggtgaaggaaacggtgactcgattttaagtgtacccagggaagggcttattgagaaggtgatatctgagcagagacctgtaagaggtgagagagtcagccacgtggaaagctgggagaagagtgctcctggcagggagaacagcaggtgcaaaggccctgaggtgaggacaggcccgaactgtcggaggaacagcagggaggacaccataactgcagaggagtgaacaaggaaagagggctaacgaacaagcttagaaaggtaacaaggcccgatgtaacagggccgtagagacacgggaagggcttgggcattgcctgcctggccttggctttcccacccttgttttgtgtttggggaaccactcctctcccctacaccatcagttgcagtgaggtccctggctaagattgggtaagtaagcccagacctggccaatcaaggtcttccatcccccagccccagtgactggctcagggataaatgagtgacccaatccagtgctactgcaaaagaggcactctctttttgtggggtggctaagcaggtgggagttaagtttgagctgctggagcaggggtgtgtgtgtccccaagtgaagggagtgcctgcaaataaagccagcaaagagaacagcagagctgagacatggagaaaggaaaattcctaatgacactgagctcctggatctggctagacctgaagcttaattccccagaatttttcagtatcataaaccaatgcattttggttcaagccagtttcaggtgggtttgtcatggggttcttcaacccaaatcctgctgccatcctctgtcctcactccacttgttcctccccacagtggcatacccggatgcctgcggtgcgacacttgagcacagcatcagggacggtggcccggggtgggtcaatcatggatacaagtcccgcaaagcagaggccgctagatggaaagttcatggcctctacgtcgaaggcatagccaggcgggtagtccttctcattcaggtagagctggcagaagcctgaccggaaacggggaagtcagggaagagccctgggcacaccctttcttagcagggccaggaaatgggtaaaataaccaggccccttgcaccaaacacctatggatgcctgaccttgtgctgaccccttcactcacattatctgaatctaccctcacaaccaccctgtgaggcccattctcatcttacagatgaggaaactgaggctcagagaggggacatttcttgccagaggtcacacagcaagtaaaaggcccagaattggaccacagatctgctttctagggtagaggcagcgaagtttaaggcgtcaggacaaaaattgggagaggttagaggtcaggatacggataaaagtccaggtgaggactggggtcaaggtagaaagtgaggacagacaggggtcaggactggtacagggaaagtcaagggtgaggctgtggactgcgacaaatcagccagcagccagggatgaggacggtcagggctgggccgggagtggtgggcagggtctgtgctagctcctcctcgcacctggagtctcctcccctgcccaggggtctcaccgagcacgcgttcgcccaggcctcccaggctgaggtaggcggtctggaaggcctcgcgccactgctcgtccagcggcagctcctggcccttgataaggatggagctgcagcgctccagcacgcgctcgggggcgcccttcatcaccagcaagtgtcgcgggtcccgcgggtcctccagcgtatggatggacagctgtgggcgggggggagaggcgaggctgtggacgggggaacggggcggggctgtggacgagggaacggggcggggctgaggagaggggcggggccgagagctcggtgcgggctctgagagctgcggggaagggtgaaggtggaagatggaggccttgtgtggaggggtccttggtagaaggtaagcgttaaggcggggctaggtgcagatttggagtcctggacgcagggaatgaacagaattagggtgcggagttgggctgggggcggatttggagagcgaggtgctccccatggacagtcccgccgaggagaagctgtgggcggggctgggtggtgggcggggccttgcctctggtggacggggccataggcggagcgggagatggggtggggtttggctgcggagagaaggggcaaggagcgaagcccctcgtggcccgctgatgtgggtgtggcctggggcggggcccgaggtgggcgggcccaggccgtgggcggggccggctgcgcacctggaacttgttggtggagttgaagggtatctcgcagacttttgggaagcggtcccggtagcccatggcgttgcccagcgtcagctccgagaacttgagcagcgccgtctccgatgcgtctccaatcacgatgcgctgggagcggggaccggtgtcaggggcgaagccggctacaccagcctcccgggattccctggaggccccctggctctcaccttgggcacaggcactgcatcctggccggacttgaaggcggcgcggttgcacagggtgagcacccggcacagcgcccgccacgtctccgaggactggtcaaacgtctgccctgcagaccaggcgtccaggctgggtcccgcacggcggctctcccggaccagaaccgagccccctcctcctaggctcatatcgcgggccccctccccagacctgggtggaattgggttccacccaaccctgagggacccagcccccggatgacccttccctctagacccggtagcgagtctcctttgagacctggagccgagccgccccgccttcgtacaaagccctccctacctccctatccctcttcaggtctccaccatccaccagatcctgccctggcgcctgtgccctccctcccccacacctgactggtcttccgtggtgtcagctgtgtggatgtggttgtcaaaccacagatgggacacagtcatgcggttctgagtgagagtccctgtcttgtccgagcagatcaccgaagtggagcccaatgtctccaccgcctccaggttcttgaccacgcagttcttactggccaggcgcttggctgtcagggacaggcagacctggggaaggggtgagcaccgcaggctggggacccaccctggcttccagtcctcttccccgcgtcaaagaacggggaaggctttaccccagccgcggggctgcgtgtgcaacgtgcttctgcaaacaccaggtgttttcttggccccagcttttgttcagccagtgctttgtttgggactccttccccagtctgcccagatacagtagcgaggcccctctctgagctgtcccagccgaggttctgaaaattctcttcacacaatcaaaatgagaagaggaaccttccccgcacctccctggggactggtctggagctgggtgctgactgtggaaggtctggtgacatgctggctgcctgcacaggacatcagcctcttccagttaaggacccggcctcgtcatctctgcgccctcaatgtgtggcacaggacttgccccagggttgcctcgggaaggacttgctgaatgagtggatgatgggaaggcaggagaatggatgggagctaagtggacagatagacaggcagggaggtgatgggggaaatgtggaggaaagaacagatggttgagcaggcccctcagctccctgcatccccgcctgcccccactcactgtgacagtggccagcagcccctcaggcacataggccaccacgatggccatgaagaagaccatggcccgcaggaaggtgtagccaatgcacatggccacaataaaaaatgtggcaccgaagagaatggccaggcccgcgatgatgtccacaaaatgctcgatctcgatagcgatgggtgtcttctcgttttccacccccgacgccagcgatgcgatgcgcccaatgatggtgcggtcgcccgtgttcaccaccaggccctgcacggtgcctgcaggggggccaaggcgcgactcagggatagggggcggcagtggggtgtgcactgccgtgtgagctgaaggacagccagtcactgccagtggaggatgtgacctgggagagggtagtgacagtgggagacagagaagcagtgtgccctggggaggtggcagtcacggggaggtggcagtcatgcaggagagagacagggaggctgaagccccctgtcctagaagatagcaggagagaggccagtggaggcagcagttactgggcaggcaggcgggggcttcacagaccctcaaggcacatggtggagaagaaggcgatgttgcgggtctccagagggctctcgtgcgtgcactcgggtgagcgggtctgtggctcagactcccctgtcagcgaggagttgtccaccttgcagccctgggccgccaggatgcggatgtcggcgggcactctgtccccacctttcatctccaccaggtcgcccaccaccagttggtcagcgttgatctggaatttgtctccatcgcggatgacagtggcttgctgcggggcaggggcaccaaagttgaggtggacgggggtgggggtgggagctgctgcatgtggggaggtaaaggatgaggagagctgggacccatggggagagatggaggccacagatgagggacaggggcctgatggaaggaggctacaggagcagtttggagtctctgggatctggagtggctgggtgctggggaacccacctgtggcacaaggttcttaaagctggcgatgatgttggtgctcttgaattcctggtagtagccaaagcagccggtgacgacaaccacagcaatgagagcgattgccaggtacagctggggacagggaaggggtggggttattcagaggggccggaagctgcctgcctgaggccaccgacctgctccctggtgccctggttttcttggttttccccatgcttttccccacctactaggaagctccatgcaccattccctgtagcctttagccccctcccatgtccctcatgtcccacactcgcctgctctgtcttctcagtgtcttgtgtttctgtgtatatttcatatcctctggccctgaatcctcaatcttccatgtccccatatctgtgacttgtgccccaaatcactgtgtgccttggtctgacgtgttcccttctcctgtgtccccaagccttgcattccccatgtccactgtcccatgtctcctcctgtccccatggcctgtattccccgtgtctccagtttcacatcctgggttttccataatctgctgccaccctctgtgtgtcccctgggcccccttgtccctgcatcctcacatccccgtccctgcgtgtgctgcagaccttgtacgtcatggtctgtgtcctctgtggccacggcccccatgttctagctccccagtcactgtgtcccgtgtctcccatgtctgtgtatctccgagttcccatcctgtgtcccatggccatgacttttcgagcctctgtcccatgtcacatgtccctgagtccccatgtcccttgccctcatctctgccatatgtccaatgtcccttgccctgcacctccatttcctctctgtctctgtgcttctatgtctcatgttttgtgtctctctatgtgctgtgtcctgaggcttgggtccctgccctggtgtcctatgtctgagtcccagggtctcctattccccgtgcctcagtctgtcctgtgtctgcactgcatgtcctctgcttccaagtcccatctcttttttttttttttttttttttttttaagatgcagtctcgctctgtcgcccaggctggagtgcagtggcatggtcttggctcactgcaacatccacctcctgggttcaaatgattctcctgcctcagcctcccaagtaactgggattacaggtgcccgccaccatgtctggctaatttttgtaattttagtagagatggggttttgccatgttggccaggctggtctcgaactcctgacctcaggtgatctgcccgcctcggcctcccaaagtgctgggattacaggcatgggattacacgcccggcctccaaatcccatctcttacgtatcacattgccatactctttatgcccccacctatgtccccatacccaagattcaccccagtgtccctgtgtcctgtgtccttgggtctgccccatccatatcccaatgtccttcaccctccatgacccctgtcttgagactgcctttcgtgttcgtctatccccatccttctctgcccctcttgtcccaagtcccaggctcagtgtcttccatccccaggtccccatgtcctgagcctgtccccacaacatggctcacattgtcgtcggtggtgaggtccccctcactagcctggatggcaaaggcgatgaggcagatggcggcggcaacccacatgaggcactgcaggcccccggccagctgcctcgcgaacttgacgtactctggggtgccccgtggtggccgcagtgcgttgggcccatcccgcagcagcagctcagcagccaggctcgcagagaggccctgggacagaggggcagggcgaggcggtcctgggggctttcctccacatgcacaccccgtggaaagccccctgcttcagtttcccttctccagcttggtctgtcctgctccttctcatctctttgtctcttggttcctgcccccaccccatctctccctccctccttcatctctccctttgtctctctctcctcgctcccctttctatgtgtctctctcctgctgctctctccttatttgtctctgccttctctgtcttgctgtctcttttcagctactcctctctccgtctctgtgtgtcaccctttctctctaatgctttctcccttctctccctctccctctctctccctctctccatctccctccctctctcctcccctccctccatcctttcctctctccctccctccctctttccttttctgcctccctccctctctctatttctccatatcttcctctcttcatctctccctctctctccctctctccatctccctccttccatctccctctccctccctctctcctcctcccctttctgtacgctcccagtctccagctcaccttggtggcactggtctggtatttctgttccagctccgccactgacagctggtggtcgttctgtgtggtggggtggggcagggtgcttgctctgggctctcctggccccctccccgcccactgcctggttcccagcctaccctccagctcccgcccctccccagtcagagctcacaatctccatctccttcttcatgttctccagcttctccttcctcttgccacccccgccacccgccttcttcttcttgctcatcttggcagccatgtccccgccagggccaggacccagctccaccgagtagagctcatagttctcctgggaatggacaggatggagggagggagaactcagattccactgcaacccctgtccccactgcaccccggacccctgggccccactcacggccttccccatggtgcccggtgcctgtgctcccacccaacagagcctgggcccggaccagtcctgatatacccagggagggcggtggggtggagcagaaccgcccgaccacagctgattacaggctccttggggtgacctctaggcctgggcacctcaggcattccctcctgggctggcccccccctcccctgcccagatccccccatgtcaacctgccctgagatcagggagcccctgggaaccgctgcagcaacaagaagagcaaacataaggtgctcattatgcgctgggcattgtgctgacggcttccatgtgctaacttatttaaccttccaataaccctttgaggggacaagaccctttacagatggggaaactgaggcatggaggggttgagtcattctcctatggctccatcacaggctaggacataatggagtgagaaccagatcagctggctgcagagtgtcctctttcagtctaaatagcacgtgcctgatcaactggaagaggagggtgctcccacactctttttttttttctttttttttttgagatggagtgtcactctgacacccaggttggagtgcagtggtgcaatctcagctcgctgcaacctccgcctcccgggttcaagtgattctcctgcctcagcctcttgagtagctgggactacaggcacatgccaccacacccagctaatttttgtacttttagtagagacggggtttcaccagg[137 bp omitted]actctgactattcactatgggctgggtgtgctctgtgtgtcactcaaatggtttccttagcatctaacagcagccctgtaaagcaatattctcttcttagcccccatcagggactttgcagaagatttcaacgtctaagaattagggacagggttccagcccgggcttgaccccagggcttgaccccagagcctagctcttctatggcaccaccaatggaaaaacccaaacttcactgcagcagcaccacacacatgccaggctctgcacgtgtgacctcacgggtctttgcaaaaaaccctgtgcaggcagaactatcattcctgttgtgcagagggggaaactgaggctcacagggactcacatatccagctacagactttacagctctcaaccattccccgtccctaccctagatggggaaaccaaggtgcaacatggggaaaggatgtgtccaagggtcttggcttgatcttggtgttgggtgacagatgccaggaggcctggggactccctcctcatccctcaggtagggacctccatgggcagcagcagcgaggggctgggccagtggaatggtggggaccttggtatgttatggggtgagcgtgtctccaggagcaggtgagcgtgcgcctgataagataactgccctggcaatgtccttctctactggggcaggtcacctgggaaactcaaagctgttgggcagccagagctcctccccgcacccacacggctggtcatccccagcctgctagaagaaacctccaaagaagaggtggcgtggggccacatgctgtccttgtagtgaatctactcgctcactgggctcccatcagctctgagccatgtatgtcaaacagcttgtgtcaccccctgcttacaaccctccaaagccttcccttcccactcagaataaactctgcactccttcctgcaacatctggccctggtcacctgtcctgcctctgttgctgctaggtttccaggggcactgacctctctgctgcactttgcacagaccaaggtcgttcctgcttcaggaccttggtacttacagttccttctgcctgggcccccttccttagatgtctgcactggctttctcacctctttcaggtctcagctcaaatgtcacctcttcagagagtccattctgtaatactgcacactgtgttctgttcctttaccccactgtatttacacctcctactccaacctgacactgtgttttctttttatttgtttggtgttcattagaaggaggactgggccggacactgtgactcacatctgtaatcccagcactctggaaggctgaggtggacggatcatgaggtcaggagttcgagaccagcctggtcaacatggtgaaaccctgtctctactaaaaatacaaaaattagctggatgtggtggtgtgtgcctgtaatcccagctaccagggaggccgaggcaggagaatcacttgaacctgggaggtgaaagttgcagtgagccgagatcatgccactgcactccagcctgggtgacagagtgagactctgtctcaaaaaaaaaaaaaaaaaaaaatagaaaaatagatagataagagatgttagacagatagatggatacataaatgatagatgattgatagattttttttttttttctttttgagacagagtctttctctgtcgcccaggctgtagtgcagtgtcatgatctcggctcactgcaacctctgtctcctggattcaagcaattcttgtgcctcagcctcccaagcagctgggattacaggcacccgccaccatgcccagctaatttctgtatttttagtagagacggggtttcaccatgttggccaggatggtctagaactcctggtctcaagtgatccacccgccttggcctcccaaagtgctgggattacaggtgtgagccaccatgcctggccagaattttttaaatttttggctgaatcatttggaagcaagttggagacaggatcccctttatccatacttaggcatgtgtcttctatgaataaggacattttcttacataagcacagtctaataatcaaattcaggaaattaacattaataaaacactagtaaataatctagagcaagcttgtccaacccatggcctgcaggccatatgtggcccaggactgctttgaatgctgcccaatacaaattcgtagactttcttaaaacattatgagatttgtttgcgattttttttttttttagctcatcagctattgatagtgttaatgtattttatgtgtgacccaggacaattcttcttccaatgtggcccagggaagccaaaagattggacacccatgatttggaggatttatttgaatttccccagttttcccactaatgtccttttcctagtccaggatccagtccgggaccacacctcacattttggcttcctccattgcgtaacaattcctccatctttccttgtctttcatgacctgggcgttttggaagagtatgattcagtgattttgtagacttcgctcagtgtggctttgctgctggttcttcgtgattaagttcgggttgtgtgctggcaggaacacagaagggatgtgtgtcccccccatcccctgccccagagcatcatcgtgtcaggccatgccccattttggagtctgtaacttgtctagagcagggtggacatggtggggaggggtctcaagagccttagggagtgatcaggaaaccattctatgccctctttaatttttactcaagacagtgccacagccagggctggcacccagctgccctggtagttaaagtaattgaaagaaatacagccactgcctgagcccccagcacttcccctaagactccagacctcccacacccaaccccttaaagtggatgcctgtgccagtcccaaggccttgtcctttttttttttttttttttttgagacggagtctggctctgtcacctaggctgaagtgcagtggcacgatcttggcttactgcaacctccacctcctaggttcaagcgattctcctgcctcagcctcccaagtagctgggactacaggcacgtaccaccatgcccagctaatttttgtatttttagtagagatggggttttgccatgttggccaggctggtctccaacttcttacctcaagtaatctgcccacttcagcctcccaaaatgctgggataacaggtgtgagccaccacgcccagccacccttgtccattctgaccatcccctgctcagctaggttcatgggtaaatacttttacctactcccctaattttgcagtcttcagatggtatgcaagttgtgtgtttttgtggggaaggtctttgcttgggtcatttattattttaccgtgtgtctaagcaatactaacccctgtctctgggaggtgaacactgaggccttagtccacaggcaggatctggataagttgggaagtgttccaagtctttggcaccctggaatgcagcctgggtggaccgcacgatgccatttcaggcggatggacaacccctagcacaactcaggggcaaagaaacttctcacaagaatgttgcaagtgtgacatggtccacagtagtgcaagtttctctgagcctggggcacacagaacgttggaaacttttttgagaacaattagtggtcagaattgaaaaaaattttcttttcttgagaaagaggggcagaggacagactattaaatggacggtggtccaggagcagtggctcatacctgtaatcccagcactaggaggctgaggcgggcatatcactggaggtcaggagttcgagaccagcctggccag[136 bp omitted]gggtaaaaccccgtctctactaaaaatacaaaaatcagctgggcatggtggcgcatgcctgtaatcccagctactcaggaggctgaggcagaagaatcgcttgaacctgggaggtggaggttgcagtgagccaagattgcgccattgcactccagcctgggtgacagagtgagactgcatctcaaaaaaaataaaaaataaaaaataaaaaaatttgccaagtgcagtggcgggtgcctgtagtcccagcaactcgggaggctgaggcaggagaacctcttgaatctgggaggcgcaggttgcagtgagccaagattgcaccactgcactccagcctgggcgacagaacaaaactccgtctcaaaaaaaaaaaaaaatgtggatggtgaacattacttgggtttgaaggggaatttgaacaataatgtcctagaattgtagccatacacactcttaggaacccagcgccctgtaaaccttgatgggatcagacccctggctattcctcctccttcccatgttctacttttccctttcatgctttgggatcctgcccgcccaggccttctgcttttccaaaggatcatttcaaaacctcagcacatgcaatttcctctacctgaagtgtgcaccctacctcctccccatgtttaaccactcctcacctttcctgttaagcacagatgatccttcctccgggaagccttggactacccaccaggctgagtcaggcacctccctgggcttccacagacccctggggtccccatcacagcccccacctccctgcctgtgcttcccccatcccagtcctgacgactctgaccctataattcctccatcacagccctgaccactctgggctgtcatgctttggtgacatttcatctccccctccagatccatgagggcaggacccaggatgtctcagtcaccactgtgtgccctgcattgcctggcccaggctggccttggggagtgtttgccaagtgacaggagtcattgtgactgtgactttgggtacagtgtttgcatctccctgataagataatgggcccagcaatgcccttcacctcctgagcaggtcaccccgccccctcgaccctgggaggatgaaagcaaggggctgggcatacagggaccttgcttctcccgcctctccaggccaggtgcaggggcaggtggtcagaattgaaaaaattgtctaggagtcaaggagttggcccccagcccagctaagctggcagccaggcccctgcgttctgtccctctcccatctttgtgcagattggaaaggtcagccatcctgggctgggtgcagagcccttcacttcttcaggaaatttccaggctgtacttgctctgggattttaaaaaatcatattcagggccgggcgcagtggctcacacctgtaatcccagcactttgtgaggccgaggtgggcagatcacctgagatcaggagtttgagaccagcctggccaatatggtgaaaccccgtctctgctaaaaatacaaaaatcagccaggcatggtagcgggcgcctgtaatcccagatactcgggaggctgaggcaggagaatcactggaacctgggaggtggaggtggcagtgagccgagattgtgccactgcactccagcctgggcaacagaatgagactccagctcaaaaaaaaaataaaaataaaaaaaataagggtactggtggagagacttcctccatgggatggggcaagggcagagcgctgatgtccaaatccaagctcaaagattcccaggggagcaaggaggccttgtggttcctagaactgtgaagggtacagggcgattgcaagagggcttctggctcgtgggtctcctgcttctgggctgtctgctgtcacaagaacctgcaggatcattaacaagctcagaacgatggccctgatgctgaagcccaaagctagcctggaatttctctttgtgctgacctcgttttccaaacggctcactatccgtgcctatggagatgaagacaggccgatgggggtgtttttctaagaaggggtgaaattgcagaagggccacctggagtgaaactgaaggccatgatcagggttgggggagggaggattcagcagaggagaggaggaggcaatgcaggaagacagtgcggggatcctgggcacgcccaggtaggagggcatgctgggagaccttgggaagaagtggggttggcagactgtgaacaaagtggggacaagtcccagggcagcaggaagggtgggatggagaaggggttggggctggtatctagagaagaggggaagcttccgaggcatccatggaaaggggtataaggtgggtcaggggatgtttcaccatgggggacagagggtcactctccacccaccaagcaggatggcacaatggcaagtattcctagcaggaagaaacaaaagatgaaaaagatgcagagaggcaggcagtcattcacaggaacacttaaaggcattttgtagatggtcatctccatgactttgacctctgggctccggaggtcagtcacacaggcatgaaccctggtggagggaggggcagggtctgcagaaggactgagaaggatcagcagatgcgaaggaatggggaccaacagaatcaatcccatcaacaggaatgtgctgggaacactcaacccacagtgaacttggcctttgttgtgggaaaagaaccctgcaatgcccccactgacctctatgatacccttgctagccctcaaagtatcctgttggctgctttttttttttttttttttgagatggagtctcactctgtcacccaggctggagtgcagcggtgtgatctcagctcacaacaacctccacctcctaggttgggatcctcccacctcagcttcttgagtagctgggattacaagcatgcaccaccatgcccagctaatttttgtatttttaatagaggcagggtttcaccatgttggctaggctggtctcaaactcctgacctcaagtaaatcacccaccttggtctcccaaagtactgggattacaggcatgagccaccgtgcccaacccctgttgtcttcttctgtctccctaaacccatccctgttctccaggaagcactacctcttggtttgccagtgcttccagttaggtctggtcctagcaagttattctgaactcccctttcagtctaaaaaatgctcagtttgaattttaaatccagtcactcattgctttaatccagtcactcaatggggataagttctgagaaatccagtcactcaatggggataagttctgagaaatgcattgttaggtgatgtcatcattgtttgaacatcatagcttgtactcacacaaacctaaatggagagcctactgcacacctaggctatatgggatagccttttgctcctaggctacaaacctgcacagcaccttactgtattgaatactgtaggcaacttataacacaatggtaagtatttgtgtatctaaacatatctgaacatagaaaagatacagtaaaagtacagtataaaagataaaagtggtatacatctgatatgatttgctgtgtccccacccaaatctcatcttgaattgtacctcatctgcctgaatcagtgctgaaccactgaggcttaaaacagtgcctggcactgttacccaataaatgttcattgaatatatgagagtcccatggtatctggcaacgtggacacacaggagatgtgaacatgtgggcacacatacgtgcatgcaacagatgaatcagaaagtggaaacctcctcataaactttactgctcttaaaaatgctgatggatgaaggggtgggttacagattaatagcatctcaaggcagaagaatttttcttagtacagaacaaaatggagtctcctgtgtctacttctttctacacagacacagtaacaatctgatctctctttcttttccccatatttcccccttttcttttcaacaaaaccgccatcgtcatcatggctctttctcgatggtcgctgtctcttcggagctgttgggtacccctgcagactaacaacagacagaacaggcacacaaggattaatatgaaatttataattatagtacttccgatggtcttaacccaagtgacagggttaagatttacgaggccatcagcaactcctgcaattgcctcagttcctggcaccaaatttaaatgggcttttgatgttttggaaatttgttcttttaatttggaaatgtctaaagtgagattatcttctcttccctgtagatggcgtctaaccatgtcccagtgatgctcagactcattataaacttggggtgtaatacaaaaatctgacgtattccagtcacactgtaactggaaacgatgttctaagctcatgagcctgtctcccatccaaatgacagtttgtctaagatcattaatttggtttgccaatttttgatcaatactagattgtgaattccacaatcttgtagaacttttttgccaatcattaacaaagtttactgactgaacagaagagtgcaatgcaactcctgccacagcagccatagctgtgactgcaattaatcccataatcactgtaattaaagtaaaaatgaatcttttggatctatttaaaacgccttttaatacttcagtcaaaatatgaacggatggtgaggcctcccacagtcggtccatggacacaaggatccacacgccttcccttgctctcaccagcagaatacggtgttgccaattaaaagttgaatcaatgcaagtaaacaatctgcagttttcacaggttatagtttgagagtctggtttaataactatatttcctataactagcatataaagggactttacacagctttgtaaaggaactgttagactggaatttaggtcgatagtataaaatggcttatgatctcgtttctaaagtttgatttccagaccaaattctaatgtagtatgaggctacactaagcctccaccattctggatgttcaggaccagaaacaggacttattatttttggtcatggggtagagattcctttttctccccatttccaagggtagaaagactgtaattttttatgcttatgttcgtctaaactttctatgaagtcgctatcaacagttggactcacttgtgcactgggacacgactgagtttgtcctgtgcaattgtggtagaattgacctcgaggtgcccaatctataatagttcggaattcactgttttgtaatatcactgcactattggccacacattcttcccaaactaaagcttctacattttttgatcctttggaaatttcctcggggcaaggtttccctttaggtctaaattttaatgatctttgataagaaaagtcttgtaaataatttacctgtggcctgagcgacatcccgcttaccatgtgataagtgaatcttctgatgggactgacagtaggtacttctaccaaccaattttggactgcaggcattaaacatcctggtgctctccccaggcaaataggaggataatgatacccaatgaaaatatttatcatcatcccttcttcctcaggtttggcagggcaacgatcatctgttggaccaggtacccatacactatcattaacatatacttccataggattatccatccatgtgactgcctgaattaagggcgggaaaggcacataggcccagtaattataattagctgcagctgctcctgcaggcatagggagacttaccaccattgatacaatcatcaaagctgcaagcagcatactctctggagtttgtgtcacctttgtgttctctagatattttgtagctaactgtgtcagcttctttaattgtgcccaagtcagcagctctgccttcttggtggatggcaacttcatctgttcttctgacatcaccattctgttcatcttctgagtcgatggttctcgatgacggtgctcgattgcggtgtctccgtctccgtggaggtgcttttctttgcatctctgatgggttcattgtagaacttcaaatgtctagtgggtatccaaacaggacgctgattttctcctggtgaaacgcaagcaaaacctctcccccacgttaccaccttccatatttcccatgtcttatttttattatctttccaccaaatcagttttccttcatgtgggctgttctttttaccagtaagatgttctgcagaagtagtagtctgatttctataaatgtttaaaaaatttaaagtatagagtgctagactaagttgcatctgaggagtggtacactccttactgtctcccccttctttttgtttaactaattgagttttgagtgttctattagttctttcaactatggcctgtccttgggaattatagggaattcctgttgtatgtgtaattttcttggaaagctttactacagtatcctggtccattgttagttttgattttttctggaactcccattacagcaaaacaagataataaatgttttttaacataagaagtactttctcctgtctggcaagttgcccatatgaaatgtgaataagtatcaactgttacatgaacatatgataatcttccgaatgaaggtacatgtgtgacatccatttgccataacacattaggacacagacctctgggattaactcctgcctcttgagtgggcaggtgtaggacttgacactgggtgcaatgtggtacagtatcttttgcctgtttccatgtgacatcaaatttgttttttaatcctgctgcatttacatgagttaaagcatgaagttcttgtgcttttatgaatgcagatgataccagtaagtcagcttgttaatttgctttagtcaaaggccctagtaaattagtgtgtgctcgaatatgagtaacataaaatgggaaatttctttttcttacagtttgttgtaataaattgaatagctggtttaactgatcatccatgctatatttgattagagctgtctcaacatcccttgtagcctgtactacatatgcagaatctgatacaatattgataggttgatcaaaatcttgtaacactgtaatgactgcaaccaactctgctctttgagtcaattgatattgagttttgattactcgctcatcagaccccagaaaaggtgttggttgatatagacagcaggacggtggccatggaagtcagaatccactaaggagtgtgtaacaactcacctgccgaatcaactagccctgaaaatggatggcactggagcatcaggcccatacccggccatcgccagcagtcaatggaatgtgagtgccttagaggtcttggggccgaaacgatctcaacctattctcaaactttaaatgggcaagaagcccagctagctcagtcggtagagcataagactcttaatctcagggttgtggattcgtgccccatgctgggtgccagatgaagaggtgagttgcccctaaaaaggataccctattccttctctttcttaatttcttttagtctcaattgggactttaatgccattttcattttttcctagtccctttcctggtatatatcccatctcagtcatgattttttgatttgcggggctgtataatggagcaggcatagtgatttccgcaccccgttgttgtaataaatctcgaccccacagattaagaggaatcgaagtagtcattggctgaacagtactttcttgattatctgaccctaaacaatgtaaaatcttagtactttgatacacttctgaggctgtgcctacgccgataagtcctataacagcctttgtttaggccaattttttggccactgattgaaagcaatgatagagacatctgctccagtgtctactaacccttcaaactgttttccttgaataatggccttacacacaggtctgttttctgagacctgacttgcccaatatgcagcctttcctgtcggatcagtgcttccaaactctcctattctttttattttactatttccaatcttaatataaggcaggagtaataactgagcaatcctgtctcctggacaggaggggggacttcctccaacacaggcagtcactgatgtcctagttcaaatgctccagggggaacagtccattactcactgagggaggcaggctttcctattttctgtttcaagcttttgatcacaatggagcaaatgatcacaatgcagcccaccaggatgctggtgatgctgaatccaaaaagtagtctggaattgatctgtgcttttctctgattcccaaggaagttggcttcctgggtctgtgggggtaaaggcaagctggtgtgaatgtttccaagatggggagggggaagaaaatccctggggagaggtgaagagggcaagatcaggatgatggcatgatggaggtcagggcagggctcagtctcccagaggaaaaaggaagaaaccagggagccaggatgagggagtagatctaggcagaatacagagggaggagcagagaggtggccctggagaggtgcaagggcaagcagatggtgaagagggaggaggcaaatccccgagaaacacgaagaggtccctggggagaagcagggcatcggcaggaaagagaaagaagatctggggacaaagagagttggtagctgggtggtgcccatcctgagggagaacaccagagcggggattgccagcaggacgcagaagaaggatacgacagcgagcagtaaatagtctctttctggaggacacaagggcatcagggtgactggttgcattggggcgagcagctgcactgggatgaagggctgcatggggatgagtggctgcatcggggtgaccagggacttcaagtccctggggctcattgcagtagccataggccttggcctgaggaggagatgctgggtgagtggaatctgcagacaggggtcatggggtccgggaaggggacatctgagtccccaagcaactgagaccacccaaaccaacccctctggctagaaaggtactgaaagttgacactgtcccaagccaggggacagcgctccaagccagaacccaccacagccccgtgctcctgtagagtagccttgctggctctggaacacccacgccaccctcctctagcctctcacaaccccctccctgctcccctctggctgttgcactttcctcctctaaactctccctacccctccttgccccgcaaactcacacacccccactgttttctcagcctcccaaagtgctggaattacaggcgtgagccactgtgcccggcctatttatttattttttgtagaggtctcactatgttgcccagtctggtcttgaactcctggcctcaagcaatcctcctgcctcggcctcccaaaatgttgggattacaggcgtgaatcactgtgcccagccactcttcctttttgttgttgttgccagtttgaacgcctgatgggttcaatatatagtgtgtggatctcacatccagattgaatataagtataatgggcagatttatcactattaggaggctactgtacattaggcccaggctggcccctgagggccacatggtaactaaggcagacaagaccataactcagatagaataatagtctccaatcccatccaggttgctgtgaatgccattaattcattccttttcatggctgagtagtattccaccatatatatatgtaaaatcagtttctttatccactcattcattgatgggcatctgggttggctccacatttttgcaattgcaaattgtgctgctataaacatgtgtgtacaagtatctttttcacataatgacttcttttcctttgagtagatacccagtagtgggattgctggatcaaatggtagttctacttttagttctttaaggaatctccacactgttttccatagttatactagtttacattcccaccagcaatcagggaaatgcaaatcaaaaccacaatgcgataccaccttattcctgcaagaatggccataatcaaaaactcaaaaaataatagatattggcatggatggagtgaacagggaacactttccttgagttttaactccagactggctcctttgctgtttttctggtggggctcttaccacatttcccacagccattggctgtgtgctcctgcatacttggatgctcctctcctgcctgggccccaccaggacccctgagatccaggagccgtggcttttgggggctggtagagaagaaacagggagctacgtgaaggccaatggcagaaaccaagagagtttcaagaaagcaagaaagagaaaccagctctgaaaatagcaaaaggaacaacgggaaaaaataaaatagtttcatgtaacctaaaaacagacattgagtcttcgaatcaaattgaaagcacttgctagcgtcagaggcatgtgaaccagagcaactccatcttgaatggggctgagtaaaatgaggctgacgtctactgggctgcattcccagacagctaaggcattctaagtcacacgatgagataggaggttggcacaaaatacagatcataaagactttgctgataaaacaggttacagtaaagaagccagctaaaacccaccaaaaacaaaaagtggcgatgagagtaacctgtggtcatccccactgctcattatacactaattagaatgcattagcatgctaagagacactcccaccagcgccatggcagcttacaaatgccatggcaaca[133 bp omitted]gcctgggcaacatggtgaaaccctgtctctactaaaaacaggaaaaattaactgggcatggtggcacgcacctgtaatcccagctactcgggaggctgaggcaggagaatctcttaaacccgggaagcagaggttgcagtgagccaagattgtgccactgcactccagcctaggcaacagagcgagactccatctcgaaaatttaaaaataaataaataaataaaggggaatatcacaagcaacgtatggcaacaaattagacagcttagatgacagctaaaaattcttagatgaattaccaaaaccaactcaagaagaaatagaaaatctgaatagatgtataacaaataaaaagagatttgtaatttaaaatactcccgcaaagaaaagctcaggcctagatggtttcattggtgaatttcacaaaacattaaagcataaataatattaattctctacaatctgttccaaaatatggagaaagggagcactttcccagcttattatatgaggtcagtattaccctaatatcaaagccagacagtggcatctcaagacaactagagaccaatctctttcataaatatgatataaaagtcattggtaaaatatcagtaagcccaatacagcaatatataaaaagggttatacaccatgatcaagtgggatttaccccagaaatgcaagattggtttaacttctgaaaatcaattaatgtaacacaccatagtaaaagaataaattttattcatttattttaaagatggggtctcactctgtcacccaggtgagattgcagctcactgcagcctcaaactcctgggctcaagcaatcctcctgccttggcctcccagagtgttgggattacagatgtgagccgttgcacctgcccctgtaaaagaagacactttttttttttttgagatgg[140 bp omitted]cggtgaaaccccgtctctactaaaaaatacaaaaaaatcagccaggcgtggtggcgggtgcctgtagtcccagctactcgggaggctgaggcaggagaatggcatgaacccaggaggtggagcttgcagtgagccgagatcatgccactgcactccagcctgggcgacagagcaagactctgtctcaaaaaaaataaataaataaaagaaaagaaagactaaattcttcctggctaagatagggaacaaaacaagaatgttcattctcaccacttttattcaacagtatagtggaggtcctagccagtacaattagtcaataaaaagaaataaaaggcatctgggttggaaaggaagaagaaaaaactgttttgacccacagttgacttaaatttgcttgtagaaaactctaatgaatccacaaataactactagaagaaatgagtccagcaatgctgcacaagatcaatatccaaaaatcaattgtatgtcaataagctaccaatgaacaatcaaaaaatgaaattaataaaatgaattcattcccaataggatcaaaaagaataataaattcaggctgggcgtggtgacttatgcctgtaatcccagcactttgttaggccgaggcgggcagatcatctgaagtcaggacttcaagacgagtttgggcaacatggtgaaaccctgtctctactaaaaaaaaatacaaaaatcagctgggcatggtggcgggtgcctgtaatcctagctacttgggaggctgaggcaggagaattgcttgaacctgggaagtgaaggttgcagtgagccacgatcgcaccactgcactccagcttgggtaacagagagaggctatctcaaaaaaaaaaaaagaagaaattcaattaaaaaaagtaataaatttaacaaaaatacaagagttgtacaataaaaactataaatcttggctggcggcgtgatggctcacgcctgtaatcctagcactttgggaggccgaggtgggcggatcatgaggtcaggagatcgagaccatcctggctaacacggtgaaaccccgtctctactaaaaatacaaaaaaattagccgggcgtagtggcaggcgcctgtagtcccagctactcgggaggctgaggcaggagaatggcatgaacctgggaggcggagcttgcagtgagccgagatcacgccgctgcactccagcctgggcaatagagtgagactctgcctcaaaaaaacaaacaaacaagcaaacaaacaaactataaatcattcctttaaaaatttaaagatctaaataaatggagtggcatcccatgttcatggtttggaaaactcaatgttagcaaaatggcagtactcccctaattgacctaaagagtcaatgcaatctttatcgaaacctcaactggcttgtttttttttttttgcagaatttgacaagttgatcctaaaagtcatgtggaaatgaaaaggatgcagaataacctagcaatgttgaaaaagtaaaataaagttggaggacttccagttaccaatttcaaaatttattcctgattacaaagctataggaataaagacagtgtggtactggcataaggatggacgtatagctcaatgaagcaaaattgaaagtccagaaataactttcatatttatggtcaagtgatttttgacaaaagtggcaaaaccattcaatgtgaaaaggagatccaacaaatggtgctagaacaattggatctctctctctctctctttttttttttttttctttttggagatggagcctcgctctgtcacccaggctggagtgcagtggcatgatctcagctcactgcaacctctgcctcccgggctcaagcaattctcctgcctcagcatcccaagtagcttggggctacaggtaaccaccaccaagcccagctaatttttgtatttttagtagagacaggtttcaccatgttggccaggccaatcttgaactcctggccattattttcaaatgattctcacatgctctgaaccccactcattcatcattattatctctttttttttcttgagacaaggtctccctcttgtccaggctggagtagaggggtgcgaccatggctcaccacagcctcaaattcctgagcaaaagcaaacctcccatcacaccctcccaagcagctgagaatacagaagcctgccctcagagcctgatatatatatatatctgtctaaaatatatacattttttttctagatacatggtcccactgtattgatcgggctaggtttcactatcctggtctcatgtgatcctctccccttagccattatcaccttatagagtgcacattttgttccatgcactgttcaataccacttacatacattaatttaatcctcacaatgaaacaagagagaaataattattattctcattttaaagatgagaaaactggtacacagagaggttgcacaaggtgatattgctagttagtggcatggtggggatccaaacctaggtagtctagttccaaggtgtgtttattcagcccatgtttactgagcacctactactatgtgttgggctctgctctaggtgttagagctatagacagtataaaagaactacctcgcccccattaagacatctctcctggctgggcatggtggctcattcctgtaatcctagcactttgggaggccaaggtgggtggatcacttgaggtcaggagttcaacaccagcctggccaacgtggtgaaaccccatatctactaaaaatacaaaaataagccaagcatggtggtgggcacctgtaatcccagctactcgggaggctcaggcaggaaaatcacttagaacccaggaggtggaggtttcagtgagccaaggttgcaccattgcactccgccctgggcaacaagagcaaaactccatctcaagaaaaaaaaaaaaaaaagacatctctcccatatctctctcttattgagacatggtctctctcacctttcccaccaaaaattttttttaaaaaaacaaaaccctttcatcactcagccccctcaagttatggatctggtttttggtttttaattccagagacaaaaaagggggcagaacatagacccatgctaccatcttgacagagtctccatttcagttccatacgctcaagtccctcctatctttaaaacaaacaagcaaaatcatcattctcacccttttgcatctaccctagtcctgcctttcctggctcttcataggcaaacttttttttttttgaaacggagtctcactctgtcacccaggctggagtgcagtgacacaatcttggttcactgcaaactccacctcccgggttcaagcaattttctgcctcagcttcccaagtagctgggattacaggcacccaccaccacatctggctaaattttgtatttttagtagagacagggtttcaccatcttggccaggcttgtcttgaactcctgacctcgtgatccacccaccttggcctcccaaagtgctgggattacaggcatgagccactgcacccagccataggcaaaattcttgaagcaaatgtatacactgtctccaattccacacctcacactcaatccatggctctctgaaaccaggtgttggcttacaacattccagaaactggaacccatgttcttctcagctgtggcactgctctccttactctttcgcctccaagctcttggaagaaatgtctacattgtctatactacccctttcttgctcactgcctggatccctgcaatatggccactgcttctgctgatcctctgatactgcccttaccaaaggagctaattcattcccgccttcagagctggagtacatgtctcagggcttgacacacttgtccatgtacttgtttctaagcctgtcttagtttgtttgttccactatccaagggacttgccagcaaccaatacacatgcttcatctcacccaaccttcacttctgtcttcccccacctcggcgccccatgttctgttgtcctggaacatccacttggtcctttgaaaggctctgaatcaatttcctccatgaagaatatcctgacttctggattgcatgtgttgtcactgttcttctaactacttctaggtccaggactggtcttaaatacccaggttgtgtcttggactagccatactaaggtctacatttgtggactgcacagtgtcacctcccacccacccccaacttcctgaaaagtggctcctcaaaccctctactcccctagaaccaccagctaaaggaagcatcagctaaaaccccacagtattagcattcattaaaagctcctacctgaatcagcaattactatggtatttgaaaatgttctctaatggtgcataacaaattccccacaggtattaactcacagttctgtaggtcagaatggctgcttctctgctcagaatctaccaaagctaaaattaaggtgtcagctgggctgggttctcatgtggagctcaggatcctcttccaaatgaatgtgattacagcaggattcacatccttgctgttgcagtactaaggaccccgtttccttgctggctgtcagctgggagccattctcagccagaggctgcctggattcctccctacgtggccctggtgacatcttcatgccagcaatggagacctttgcttgcctccaatcctctcacacctgaaacctcttttgccaggaagactcagtccttttcaagaactcacctcattaggtgaggcccccagaggatattcttcctaacttaaagttaactgatttcagaccctacctacgtctgcaagacgccttcccagcagcatacagactagtacttgactgagtgactggagaaggagtgtgtacaccagggagcaggaatcttcgggtcatctcagagttctgcctaccacattggggatttcctgttccatcgttccattaggttgtgttctactttaagaaagatcttcccccttttccccttctttctctattctttccttttttctttctgtcagcataaaccaaggaattcttttttttttttttttttgtcattttttcttgagatggagtctcactctgtcacccaggctggagtgtgcagtgtgatctcgaatcactgcaacctccgcctcccgggttcaaacgattctcctgcctcatcctccctagtagctgggattacgggcgcctgccaccacacccggttaatttttgtatttttagtagagacggggtttcaccacgttggtcaggctagtctcgaactcctgatcgcaggtaatccgcccgctttggcctcccaaagtgttgggattacaggcatgagccactgcgcccagccggaattcatttttaattcaagactttacaatccacttctgacactactcattttcctcccctcagtaaatctcttactcttactgggcgtgtctagtttctctcttccacaactcctgggagaccctcctgacatcgcccatccgcgcaggctgcagagagagatcagtgggaggaggaggagccgagagccaccacttaggcttccaaccaatccctaccagggtgggcggagcccacttcctgattggctgcactctctgtgtcttggggtgggcgagaacggcggggccacgccccctaactaggcagccaatcaggacgtggggtgctggtttctccattgcgaagcttcagcctttgatggtttgggtcctgggagtctggttagtacaaggggaagcctagtgggtctggcgctccgttttcaagacactcggagtccgtctttgaggggaaaggtcatggccctgaaaccaccttctgccacccagcctgctcccaacgcgccagctaccccagacgccccccctaccacaggtgatccaggtgcttcagctgccccaggttctcccactaccacaggtggtccaggtgccccagctgaggtgccccaggagccgcaagagcctacacagacaccagaggaactagcattttacgccccaaactacctatgtttgaccatctttgctatacttttattccctccatttggattggcagctttgtacttctcttatgaggtaaaataatgcccaagtcatagcccccgtccttttttttttttttttttctttttgagacccagtctcactctgtcccccaggctggagtgcagtggtgcaatctcggctcactgcaatctctgccttcccggttccagcaattctcctgcctcagcctcctgagtagctgggattacagacatgagccacagtgcccggctcatttttgtatttttagtagagacggggtttcaccatgctggccaggctggtctcgagcttctgaccttgtgatccacccgccttggcctcccaaagtgctggcattacaggcgtgagccactgcacccagcctaccctgtcctccatttggcccctgcatctgctcctatcctgggacctgcataggggctttccctcagtgactgcaggtctccaaccgttctccccagggttcctggacacagaaacccacatctatgcttccacccctacagactatgaaggccaaccagaacagtgaatgggaagaggcttacatcaactcaggccgaactggttggttcggtgcattcgtggtaatgattggcttaggcatcatttatggcttggtcctatattaatgaagtctaggcatagcaacccaggggtccgctccccaaccgagccactcaccaaacactaaccagccaagtcagccatcaggcaagaaattcaaccgctgagacatctagccaagaaatcctctaaccaaggaactcaacattcaagaaacccaccaacccaggaacacacagaccacctgcctgtgctacttcaactcactcagctccagagctgtcttcgttcaccctaggggtccacacttcatgccctagatccctttagctccttgacactgggctgttctttcagaggaattttaaaccaaaaaactggaatggaatgttctggtttcctgtggtgtgtgtgtatgtgtgtgtgtcaacatgcccatgattgttttctgggtcagtggtcagtatctgtgtttccctggagctgtttcctagactgtgaaaatcagaatgtcccaatggggaagcccacagacatagaattcaggcagatgtcagttaaaaacttacctctgacactgaaaaactgtatagccctgaacagatacttttcttgagcatagttcctttgtctctaaagcaggcataattgccaatgtggggatgatatttagaaatctgaactgatgtttattctctaggggtcttctcatttgagctgggattggagatgtctagtgtctcagagcagcaataagaaaacagaaacctcttccagcttctgacatccaaatgtcaagctcttaggagaagaatggaaagtcctcaagaaatgcaaatagctttggcagaatagctgatgaagaccacctctcccccctccagaaaggcattggttccccattcatggaaaagggaatgtagagagagattagacaatagtacatccataaggttcctggaatctgcatctgaggaagaggggcgtcagagaccccagctgttatctataatccctcctcacagataaggcctagagaggctccaagttctcaaagaagatatgctacatggtgtagacatttacaaagaaatgacctcagacagccaaggaggataccccatggcccagcctagtgagaagaaggtgggttccataggaatcccaagtgccaggtggagacagaactgtagaggaaaactagggataagcagggagccatcgtgcatgaatcaaaacagagatctagactgacaccatgggccacagacaccccggggctgcctctgatgcccaagcttcatggacaaccccaagttcagaaccagatgaatatttagcacaatatttagcagaactaagtttccaccaccatggagaatggggattctcagtagaaagtcaatggagctgctgggcaagagactgctcactgtcccccagagcccatcgcctctttgttctgggaacattgcctggccacgtctcagaggttcccctctgcagccatgaaatgtgctttggtcctgtggaatgtgagcagaactgacatgtaccacaaacaaacctggcttttcaatgtctcctgggacactcctctaaactcctcctcccccggccaacggggcaagggatacccatgtgatgatttagaaggccacatgttgtagacgtggcaaagcccccattagcctgggtccctgaaccattctaggaacagcctcccttcccccaactgcctcatgtggtcaagcagaaaatagactaccatgttgacaaatgacatgcttggcctgtttccacagcccaatccacccaaaccagtgcagatgcaggagaatagagttctatttcttgcacatctgggattacagcttcaagttcatacccaacagagacatccatcttgttgggtggtctataggaaataataatagaaggaaacaacaaaggccctagtccaccttaattgtaattgttgtgatgctgagtttgtctcctctgtgggcttgggtgtctgggcagatctcatgtgtttgtgggacaatgctctgggttatggggatgcctgcagataggatgatgcctaattgtctgtcatgttagcagatctagagggttagccatccctgtccctctccagatccagcccaggctgggcctgtcacattcagctgcaaagccatgtcaggttaggatggtccatgtcaacatcagcaggcagacccaagtgtcaccttctgctacaggccttggaaagccagccagcctcctccacttcagctcccagacttcatccaacctgaatttcactctcgggtatccaactggtatttagcaccaggtaaacacaaaacgaggccaggcacagtggctcgtgcctgtaatttcaatgctttgggaggctgagagaggaggatggcttgagcccaggactttgagaccagcctaggcagcaagtcgatagataactcttttctacaaaatttttcaaaattagccaggcgtggtggcacacgcctgtagtctcagttactcaggagggtgaggtgagaggatcactttagcccaggattttgaggctgcagtaagtcatagtgatactactgcacttcagcctgggggacacagctagactttgtctccaaaataaataaatgtaaaaaataaggccgggtgcagtggctcacacctgtaatcctagcactttgggagactgaggtgggaggatcacctgaggccaggagttcgagaccagcctggccaacatagtgaaaccctgtctctataaaaatacaaaaattagccactgtggtggtgcgtgcctgtaatcccagctactcgggaggctgaggcaggataatctcttgaacccgggggtggaggttgcagtgagcagagattgcaccacttcactccagcctgggcgaaggagtgagactcaacctcaaaaaaaaaaaaatcttatctgactttgattgcattacaatcaatttagttatcagttttgggagatttagcatctttatgataagccttcctattcataaatatgatatatcaaataggacttgtacatctttagctttattttatgtattataagcaatccttttttccattacataatctaaattattattggggtagaagaaaggtattgagtttccaatgttgatatcttgtgtggcaaacttactgaactttcttggtgtaataattcatcattttacacacttacattgtctatgctaaatttgaattatttcttaacaattttaatacctcattatatatgtatttttttagttcctgggctaaacctttcagcaaaatatgaattagcatcataatcttgtttccatccttgtatgggttagttctattgttttactattaagtcaggcagttgatgtagatttctgataaaaatttcatcttttttttttttttttctgaagcaaactctggctctgtcacccaggttggagtgcagcggcacaatctcagctcactgcaatctccgcctcccaggttcaagcgattctagtgcctcagcctctatagtagctgggaccacaggcacgcaccaccactcggggctaattttttgtatttttagtagagatgggatttctctatgttggccaggctggtcttgaacccctggccttaaattatctgcctgcctcagcctctcaaagtggtgaaattacatgcatgagccaccgtgaccagccaaaatttcatcaattttgttatgttttcttctattcctggcttgccaagattttttaaattagaattttatattgaggctaggcacagtggctcatgcctgtaattccagtactttgggaggccaaggaaggagagtcatttgaggccaggaatttgagaccagcctgggcaacatagctagatctcgtctctactgaaaaaagaaaaaaaaattagctaggcatggtacctgtattctcagctactcaggaggctgagatgggaggataacttgaacccaggagttagaggcagcagtgagccatgatcacacccttgtactccagcctgggcaacacagcgagaccctgtctcaaaaaaaatttgtgttgaatcatattaaatacttttcagcatctattaacatgatcatacgagattttaattcaatcctttaacaaagttattcacaatgaaccattcttatactcttgggaaaaccttactgggtcacaatctattattctttttttttttttttagagacagagtcttgctctgtcgcccagactggagtgcagtggcacgatcttggctcactgtaagctccgcctcccaggttcacgccattctcctgcctcagcctcccgagtagctgggactacaggcgcccaccaccacacccggctaattttttgtatttttagcagagacggggtttcatcgtgttagccagatggtcttgatctcctgacctcgtgatccgcccgcctcagcctcccaaagtgctgggattataggcgtgagccaccatgcccggcctctattattcttttaatatgtgatggatatggtttgcttatgccttatttgggtcctacatagttttcatctgggggctgttctcagtcctttgcattggggcagtgctggcaatgcagaatgggttgagaagcattcaatgtgtttctgtgttctggaaacatttctatgtcatgggaattagctgcttcttaaagattggagtgggccggacatggtgcctcatgcctgtaatcctagtactttgggaggctgaggcgggtggatcacctgaggtcaggagttcgagaccagcctggccaatatggtgaaacccccatctctactaataatacaaaaattagctgggcatggtggcacacaactgtaatcccagctgctcgggaggctgaggcaggagaatcacttgaacccgggaagcggaggttgcagtaagccaagatcacgccattgcactgcagcctgggtgacaagagcgaaactccatctccaaaaaaaaaaaaaaaagttggagtgaacatgcctgcaaaatcttctgggcctgtaatctttttcgtgtagcagattttgagtactttgtcttcactatgatggtgaaagcagcaactctcggagtcaagtacaagccactgttatgagcagcttcggagtattgattcttttggtctccacactaaccctatagcctgcattcttacagactgaggataaagcacagggagctggaaagacacagtgcaggtctcacagcgaattcactgaggggccaggattgggaaccaggaaatctgccaccaaaagccgtgttcttaagcactaggtggacaacactgcctcccatcgaccgttagtagcaattcaatctttttacctgctggagtcacttgttaatcacttacctttctcttaacaaatcatttttattttcgacatagaagctaacttgaaggagcgcccactggcccagagtggtacaacttaaacatcaaaaatattaataacggccaggcgcggtggctcactcctgtaatcccaggactttgggaggctgaggcaggtaaatcaattgaggtcaggagttcgagaccagcccggccaacatggtgaaacctcgtctctactaaaaatataaaaattagccagccgtggtgacagtcacctgtaatcccagctactcgggaggctgatgcaggagaatcgcttagagctcgggagtcggaggttgtagtgagccgagatggcgccattgcactccagcctgggcaacaagagcaaaactccgtctcaaataataataataataataatagtaataacaataatagatttaaacacaccaaatatatatcatatttaatgatgaaggatggaatactttccctataagatcaacaacaaggaaaggatgtctgctcttgacactcctatttgacatagtgctggaagttctagtcactgcaagaaaaaaacgcaaacagggcccggcgcagtggctgacgtctgtaatcctaacactttgggaggcaggaggatcacttgagactaggatgtcaagaccagcctaggcaacacagcatgaccccatctctacaaaaaatattaaaaaattagccaagcatggtggcacatgcctgtagtcctacctgctcagggggctgaggcagggagatcacttgagcccaggactttgagactgcagtgagctatgatcacaccaacactgcactccagcctgaggaatagagtgagactctgtctcaaaaaagaaaaaaaggcatttagattggaaaggaagaaataaaactgtatctgcaggtgacatgagatatgtgtgtgtgtgtgtgtctgtgtgtgtagttga[136 bp omitted]agctggagtgcagtggtgtggtctcggctcactgccagctccgcctcccgggttcacgccattctcctgtctcagcctcccgagtagccgggactacaggcacccgccaccacgcccagctaaatttttgtatttttagtagagacggggtttcaccttgttagccaggatgggctcgatctcctgacctcgggatctgccctcctcaacctcccaaagtgctgggattacaggcatgagccaccgtgcctggcgtttttcttttcgttttttttttttcttttttttttttttttggagatagagtctcactctgtcacccaggctggagtgcagtggtgtgatcttggctcactgcaacttccacctcctgggttcaagcgattctcctgcctcagtctccctagtagctgggattacaggcgcccaccaccatgcccagctaatttttgtatttttagtagagacggggtctcaccatgttggccaggctggtcttgaactcctgaccttaggtgatccacctacctcagcctctcaaagtgctgggattacaggcgtgagccacagccctggacggatgtattttcaatacatgtctttataatgcatgtgaaagctaacgcatacatgggagacaatgaagggaccaatatggtggaagttttccatattccacttgaagttgcaaaatattcaatctaggtagactatagaatgtttaagtgtgtttaccataatccgtagagcaatcacttaaaacttgcaaagatatatagtgaaaatcacaataaataaattaaaatggagtactaaaatagtatttgaataatccaaaagaaagaaggaaaagggaaaacaaggaacaaaacacagaaaagtggaaataaaaaacaaataatagtagacctaaagcaaaacataccaataatcatatttaaggcacatgatctaaacacacaagttataaaatattttcataatgcacttaaaaaaaaaatagccagagccgggcgcgttggctcacacctgtaatcccagcactttgggaggccaaggcaggcagatcacgaggtcaggagaccatcgtggccaacaaggtgaaaccctgtctctactaaaaatacaaaaattagctgggcgtggtggcggatgcctgcaatcccagctactagggaggctgaggcaggagaatcgcttgaaccagggagtcagaggttgcagtgagccgagatcgcaccactgcactccagcctggcgacagagggagactccatctcaaaaaaaaaaaatagccaggttcaaaggctcatgcctgtaatatcagcacttcgggaagccgaggtgggtggatcacttgagcccaggagtttgagatcagcctggaaaacatggtgaaactccgtctctactaaaaatacaaagaagttagctgggtgtggtggcacacgcctatagtcccagctacttgggagactgaggcaggaggataacctgagcccaggaagtcgaggctgcagtgagccatcatcacatcactgcactccagcctgggtgacagagtgaggccctgtctcaaataaatacatacataaataacttgagcccaggagttcaagatcagcctgggcaacatagtgagaccccatctctgcaaaaaatttcaaaattaacctggcatggtggcttgcacctgtagccccagctactcagaagtttggggcaggaggttgtttgagcccaggaggtcaaggctgcagtgagccgtgttcacaccactacactccagactagcaacagaacaaaaccttgtcttaaaaaaaatagaagtaggccaggcgcggtggctcactcctgcaatcccagcattttgggaggccaagatgggctgatcacctgaggtcaggagttcgagaccagcctcactaacatggtgaaacccagtctctactaagcatacaaaaattagccaggcatagtggcaggtgcctgtaatcccagctacttgggaggctgaggcaggagaatcacttgaatgcaggaggcggaggttgcagtgagccgagatcacgccattgcactccagcctgaacaacagagtgagactctgtctcaaaaaataaaaaaattaaaaacttaaaaaatagaagtaggccgggcgtaatgcctgtaatcctagaactttaggaggccaaggcaggcggatcacttaaggtcaggcgttcgagaccagcctagtcaacatggcagaaccccgtctctactaaaaatacaaaaaattagccaggcatggtggtgcgcacctgtagtcccagctactcaggtggctgaggcaggagaatcacttgaacccaggaggcggaggttgcagtgagccaagatcacatcaccacactccagcctggaagacagagcaagaagaaagaaggaaaagaaagaagagaaggaaaaggaagaaaagagggaagggaagggaaagggaaagggaaaggggaaggggaagggaaggggaaagggaaagggaggggaggggaagggaagggggaaagaatgaaggaaagaaaggaaaggaaaggaaggaagaaaagaaatgattgtttgcttggtgttggaggggcttgagggggtggggaaaaaggggggaacccacacatttgatcaaagaactcttctgtgttgactgttgtggtatgagagcagagaaaatgcattgtgtttttcctgaaacacaagactccgaggcctacatcactcttgccccaagtagtgcttttctctcaagatgctcaggaggaatctttaaacaaagatgatcaaggaaatgaggcttatttataggtctgttttgaaggtggaaccagggattcctcaattggccaatcacttgagagagtagaaggagctgtcaccccatcaaaccaatcagaagccaggtgttggttcccaccctatgacataccacctccaattggccagtagaagtagagagacaggctaggaggcggggcctgcctggccgccatggtaatcccctgtggttggtgatcaaggaagagcatagtgccagacctaggtgccctcctgggaatgttccaggagggcaggagtaggaggaggagtgttagagtagaggggaaatgatgagagcagaaagggtatcataaaggaacctcaggggtgatataagtggacacagacatatgtcacaagggcacgggtttagaacaggaaggctgttgtacgtggttggagagggagttcaaagagtcagaaagctggtttcagaagttgagaggtgttagagggagacagggcaggactttgtaaggtgacaaagaagtagagactgaaaccctgtctctactacaaatacaaaaattagccgggcgtggtggcgggcgcctatagtcccagcaagaggagtgaataggtggtcaaataaggtcttagaggagctaaaggggcagggagcttatgggcgaacaggaaaggtttacagcaggaccccgcaggattcatagggacgaagtaaaggatattataaaaggaacagtgagagagctaacagaagttttactttggggggcagaggtgggaggatcacctgagcccaggaattcaagaccagcatgggcaacattgtagcaaaaccccatctctaccaaaagaaaaaaattttttttttttttttttttttttgagagagtctcgctgtgtcacccaggctggagtgcagtggcaggatcttggctcacttcaacctccacctcccgagttctgcctcagcctcccaagtagctgggattacaggtgcgtgccaccacgcccggctaatttttgtatttttagtagagacggggtttcactatgttagccaaggtggcctcaaactcctgacctcaggtgatccgcccacctcggcctcccaaagtattgggattacaggcgtcagccaccacacccagcaaaacaaaaacaaaacaaaacaaaattttagttagctgggcctggtggtgtgcacctgtagtcccagccactcaggaagctgaggcaggaggatcacttgagcccaggagtttgaggctgcactgagctatgattgtgcctttgcactcctacagcctgggagagaagaccctgtctctgaaaaaaaaaaaaaaaaaaaaaaaaaaacagaagacaaagaagttttacagggtgagagttttataagggaacagtgaatttataatgaaggttttatacccaaacacaggtccagtcactccacgcttgcagagtccaattaacaagagcaagttctggtagaaagaaggtgactttattccagagctcaggtgaggggaagaggtacaggttcctgccttaagggtattgcttcagctttcaggacagaaagcagggacttttaaaggggggcttgatgtgaatgacataaaggtggggggcaaggaggtgtggggtctatgtgacatgctttgatgtcttatctatcaggtgttctagctgtcaccatcgtgagaagagaaattgaccattgtctcaaggcaatctgatgggagagaattctgggggtgcctgatttgtttcaaggttcagtccctggaacttctaagtaaacatattgttagataagcttgccatgtagggaggttacagttgcattcctaaagagttaagtaggagatggggggaaaagaaaaaggaaaaaaatccttttttttctttaaaaatggggtactctggccaggcacagtggctcaaacctgtaatcccagcactttgggaagctgaggcaggcagatcacaaggtcggaagttcaagaccagcctggccaacacagtgaaaccccgtctctactaaaaatacaaaaattagccgggcgtggtggcaggtgcctgtagtcccagctacttgggaggctgaggcaggagaatcgcttcaacccacaaggcggaggttgcagctgagctcacgccactgcactccagcctgggcgacacagcaagactttgtctcaaaaaaaaaaaatgtggtactcaattacagtttcccactgtcaaattccattccatttctatgggatttggatgccacattcatgctggctacttcctgctgaaagagggcattgtgattagtcatcagaatggaaccgatccacttggagttggaaatatttatgagtagttggaccaatatggtgtaaggtctggaaagtctctggggaagtctgtcttgcattcccatatagaaggtgaaacagcagaaaaatccacagcagagaagtatgtctatcattgcaactagggccaaagttgtaaatagcttctttccaggtgagaacagtcctcacctgcaacaggatgccaaccattgacctggtgataatgtggggtcagacatagctttgatttttaggtgcatgtctctcagggctattgagacatttactgaattatctgagatgtgtacacagcatttagtcttaattgtcaggcacattcccagctgtcaattgtacctggagctcctgtggagatatgatgacagggtg[137 bp omitted]ctaccagaccgatgaactcagtctctactaaaaatacaaaaattagcgggcatagtggtgcacacctgtaatcccggctcctcaagtggctgaggcataagaattgcctgagcccaggaggcagaggctgcagtgaggcgagatcgtgccactgccctccagcctgggtgacatagtgagactttgtctcaaaaataaaaaataagtaaataagaaagggctgggtgtggtggctcatgcctgtaatcccagcactttgggaggccaaggcaggtgggtcacctgaggtcaggagttcaagaccagcctggccaacatggtgaaaccccaactctactaaaaatacaaaaattagctgggcatggtagcacatgcctgtaatcccaactactcaggaggctgaggcacgagaactgcttgaacccaggaggcagaggttgcagtgagctgagatcacaccattgtactccagcctggagaaaagactgagactctgtctcagtaaataaataagagcgatacagaggccaggcatggtggttcacacctataatcctagcactttgaaagatcaaggcagaaggatcatttaaggccaggagttcacgacaagcctgggcaacataatgagattccatctctacaacaacaacaaaaatcaaaaattagctgggtgtggtggtttgtaccagctacgtgggaggctgaggcaggaggattgcttgagcccaggagttcgaggctgcagtgaactgtgatcatgccagtgcacttcagcc[146 bp omitted]aaccccgtctctactaaaaatacaaaaaattagccaggcgtggtagcgggcgcctgtagtcccagctactcgggaggctgaggcaggagaatggcatgaacctgggaggcagagcttgcagtgagccaagatcgcaccactgcactctagcctggatgacagagcgagattccgtctcaaaaaaataaataaataaaataaaaaataaaaaaaagggatagagagaggttagaggagacatggtgggggttagagaaagtcaatgagaattttaaatggggtcaatgaagatcatatagctgccaaggagagatgtgttagggtaagtagggagagagtgagaaaggattgttagagttcagaagccatagtgagacataaccaactctctgccccccaggtgtttgaactgatgtctgatgaggatgaatccagcgactacctctgcctgtccatcctgggcctcttctgttgccttcccctagccatcccagccgtgatcttttcttgcctggtgggcacctgcatcatgccaatccttcaccctccctctccatcttgcccctgaccctgactcaacttcttccttgttctcccttctgaactaggagcctgagcaacaccagcacctcctgtgggttcagacccccaccctgagtccttacagttccacagcccaccctcacccaacaactgttttttttttttttgaaacagagtctcgctctgtcacccaagctggagtgcagtggtgagatctcagctcaccgcaacctccatctcgcaggttcaaacaattatcctgcctcagcttcctgagtagctgggattagaggcgcccaccaacacgcctggctaattttcgtatttttggtggagctgggtttcaccatgttggccaggctggtcttgaacacctgacctcaggtgatctgcccacctcagcttcccaaagtgctgggattacaggcatgagccaccatgcccggccacgcaataactcttttatactcatctttccctgttccctctctcctaaaactcagacaaagtttgtattgtagacaaagaactacaataaatccagtgactatgagctggcagccaagacctccaaacaagcctactactgggccatcgcgagcatcactgtgggaatcttaggtaccatcttgtacacctacctgatatacttacttagattgtaaactgcttcccagctcttgaacaaaccaccaaatatacaccacagtgcaatttaccttggctctaagcatctacttgggctgaatggaacacctgctcctcaatgtctggagtgccaagctatctaagattagaaaaacaaaatgcaaagtgttcttcctattcttacatgcccctcaaagtaacacttctttttttttttttttttttgacagagtcttcctctgtccaggctggagtgcagtgccacgatgtcggctcactgcaacctctgcccccaaggtttaagtgattcttctgcctcagcctcctgagtagctgggattacaggtgcgtaccaccatgcccagctaattttgtatttttagtagagacggggtttcaccgtgttggccaggctggtctcaaactcctgacctcaggtgatccactcaccttagcttcccaaagtgctgggattacaggtgtgagccaccataccaggcctcagcataacacttctaacaccaaatgttagagccaggggcaggggtattttccccacctaccaaccaaccagattctccagcagacaccaactgggtgtcctgtaatttaattcaattctgacactatctacctggagatggcatcagatcccacaggttgaaggctcagttccacaagactgcccccaaatttggatgtcagccacaagtggtaagttgtcacctagacttgtgactgacaagctataaatcaggtgttcccatgacccccctcctcaagcctgattaatttgttccagctggccaggtgcagtagctcaggcctgtaatcccagcactttgggcggctgaggcaggaagatcgcttgaagccaggagtttgagaccagcctggccaacatggcaaaaccccgtctctactaaaaatacaaaaattagacaggtgtgatggcatacgcctataatcccagctactcaggaggctgaggcaggagaatcgcttgaacccaggaggtggaggttgcagagagctgagatcatgccactgcactccagcctgggcaacacagcgagactccgtcaaaaaaaaaaaaaacaaaacactattatcactccagcgattccaagggttttaggagctctgggccacaaaatgggacctagaccaaatatatatgtcacagtatcacacaagtgttgccagcctgggtcagcagcttgaagggaaggaagtggtagtgccagcagcccactcgaccagaactcaagaccaactccaggaccctgctatggcgtgggggacatgggagagagaggaggaccccgttgctcgaggacagcctgcccagattcatgtattcacatcgcaagtctagttctgcctaccaagggcgttggctgtgctacctgactctggagacgtagcaatgactacttcaaattcaactcaaccccctcagaacatataaattggggtgagagacagacatgccaccagacagtgacaatcggagtggtccaatatataatggaagaaaacttgggaagggttactaaagaaacacttgtttaatgacactcgttacagacagtaaggcgggccaggcacagtggctcatgcctgtaatctcagcactttgggaggccgaggcgggcggatcacttgagcttgggagttcaagaccagcctggccaacatggtgaaaccttgtctctactaaaaatacaaaattagccaggcgtggtggtgtgcacctgtaatcccagctactcaggaggctgaggcatgagaattgcttgaacctgggaggcagaggttgcagtggttcgagattgtgccactgcactccaacctgtgggacagagcaaaactgactccatctcaaaaagaaaaagacagtaaggcagactttattcaggaccattgcaatatgcagagggaatactgagacaggggcctgcactggaggagaaagatggggctcaacactaaatacagcatgagcaagtgggaagtcctacccaaggagcagggtaggggtcagtggatggaaaattagtaagagaaaacattgagggtaagggggattctgactaaaccaacctaataggattctagttgaagacaggccagggtgaccagacatcaccagggggatggtggaggatgaggaacctgatcagatgccgaggtgtatcagatacagaggatgagggtttctagctaaactgacgtagaagggttcttttgctacaactggattttacaaagaagtgcacagaaggagaaggttcagatgcttttttttttttttttgagatggagtctcactctgtcacccaggctggaatgcagtggtgcaatcttggctcactacagcttccgcctcccgtattcaagccattttcctgcctcagcctcctgagtagctaggattacaggtgctcaccacctcaaccagctaattttttatagttttaatagagatggggtttcaccatgttggtgaggctggtcttgaactcctgacttcgtgatatgcccgcctcggcctctcaaagtgctggaattataggcgtgagccaccgtgcccagcctttcttttttttttttttttttttttcttttcttttcttttttttttttttttgagacggggtctcgctctctcactcaggctggagtacagtggcatgatctcggctcactgcaacctctgcctcccaggttcaagtgattctcctgcctccacctcctgagtagctgggattacatgcgcctgccgccacgcctggctaatttttttatttttagtagagatgggatttcatcatgttggccaggctggtcttaaaactcctgaccccaggtgatccacctgccttggcctcccaaagtgtaggaattacaggcgtgagccaccgcgcctggccgcccggctaatttttatatttttagtagagctggggttctccatgttggccaggctggtctcaaactcctgagatcaggtgatccacctgcctcagcctcccaaagtcctgggattacaggcatgagccactgggcccggcccaggttcagaagcctgactaaagtttggccaagcaaagaatccttgtcaggaggctgtaaataagagacctgtgagaaataaaaattgtcaggtgtctgagcccaagcctgcatgtatacatccagatggcctgaggcaactgaagaaccacaaaaacaagtgaaaatggccagctcctgccttaactgatgacattaccttgtgacattccttctcctggacaataagtctccggagctccccaccgagcaccttgtgacccccgcccctgcctgcaagagaacaaccccctttaactgtaattttccactacctacccaaatcctataaaactgcctcactcctatctccctttgctgactcctttttcggactcagtccgcctgcacccaggtgattaaaaagcttttactgctcacacaaagcctgtttgatggtctcttcacacggacgcacgtgacaaaaataaaatcctaagtccgccaactggctgaatgaacactgtcttggccaaggggcctacagagaaacactaaaagctgagttcctagccgtgactgaacgggtggtcgggcacacctcattctacctcctcccttgctgactgccatgaagctttcttccctaagggttaaacagaaaccagccctattgaaagactcattcactgctaatttcaaccaatggcctgaaatacatggctgctcctcccttttgtggtttcaacataacaactgaccagcattccttcctgatcagaggccacctaaccacggggtgtggctctggccagtctacagaggctgcacacaaagggcctttgtgtcctctgcatcaccttttgatgtatagggcctaattgta[138 bp omitted]catggtgaaaccctgtctctactaaaaataaaaaaattagccaggcatggtgatgggtgcctgtaatcccagctactcatgaggctgaggcaggagaattgcttgaaccctgggaaagagaggttgcagtgagctgagatcgcaccactacactacagcctgggtgacagagtaagactccatctcaaaaaaaaaaaaaaaaaaaaaaaaaagtgaatatgggatgttactacacatgtgctgtaccttcccttcatgaatattcatagctcctcctataacctgttgaatatgtatactgagccaagccattcagcgttaactctgaccttatccttcccttactggaggtgcctgctctcagcttctaccggaggctacacttctcggcctgtgagatggcccggctgcaggctgcaactctttatgagaaataaagctctcctttccaaatttgtaaacctgtattagtctgttctcacgctgctgaaaagaactgcccaagactgggtaatttataaaggaaagaggtttaattgactcacagttccgcagggttggggaggcctcagggaacttaaaatcatggtggaaaagaaagcaaaaacgtccttcctcagatggcagcaggaaggagaagtgccaagcaaagagggaaaagccccttataaaaccatcagatctcgtgagaactcactatctcaagaacagcagcatgggggtaaccacccccatgattcgattacctcccactaggtccctcccacaacacatggggatttggggaactacaattcaagatgagatttgggtggggacagccaaaccatatcaaaacctcatgattcttcagttgacatctaatctgagctaccatggtctatcaaaaaaccacagctcttgaggggatctcaatggctgttaacaaactggttagagttctggtcaggttctgattgtagagagcctctgtaacagatatggattgcctccttccccccaccctccttgttatttttatttcattttattaaatttttttttgagacagggtcacactatgtcacccagactggaatgcagtggcacaatctcagctcactgcaacttctggctcccaggttcaagtgattctcatgcctcagcctcctgagtagctaggactacaggtgcatgccaccatgcccagcaaatttttatattttttgtagagacagggttttgccatgctgcccagactggtctcaaactcctgagctcaaccaatctgtctgccttggcctcccaaagtgctgggattataggcgtgagccactgttcccagccatgatttttatttaacaaatactcattatttaacaaatactttctgagcacctactgtgtcccaggcattgtcttgggaacgaggaacacaacggagcaagagaagtaaggccaacttcttctctgatggagcttacattctagtgggaaagaaaactataaacaagtatacccaaaaataaacaagataattacagggaatggtaaatgctatagagaaaaataaaacagaataagaagctaaagtggtgccaggactggtccagcaactattatggtgttgggagcaagccccccaaaatatggccataaactgaccccaagactggccacaaacaaaatctccacagcactgtgacatgttcataatggccctaacgcccaagctggaaggttgtgggtttacgggaatgagggcaaggaacacctggcccgcccagagtggaaaaccacttaaaggcattcttaagccacaaacaatagcatgagcgatgtgtgtcttaaggacgtgttcctgctgcagttaactagcccaacctattcctttaattcggcccatcccttcgtttcccataagggatacttttaatttaatatctatagaaacaatgctaatgactggtttgctgttactaaatatgtgggtaaatctctgttcggggctctcagctctgaaggctgtgagacccctgatttcccacttcacacctctatatttctgtgtgtgtgtgtttaattcctctagcaccagtgggttagggtctccccaaccgagctggtgtctgcaatggtgtgccaccagataagtacggaaattgccagcaagtgtttagaaacacagcaatttgacatatccatgacatccaagtataggatcaatggattttcttgttgaacagggtagagaccaaaaggattggtccatgacaggttggaaacatcaaacaaatgatccttctccatagttacaagtagtttgagatacactgagctagtgggcaatgatgtctacaaggtatattatttagagtcatgctagctgctataacaaataaaccccaccatttcagtagctcacaaaataaaagttctttttttttttttttttgagacggagtttcacttttgttgcccaggctggagtgcaatggcacgatctcagctcacaacaacctctgccccctgggttcaagcgattctcctgccccagcctcccaagtagctgagattacaggcatgcaccaccacacccggctgatttttttgtatttttagtagagacggggtttctc[131 bp omitted]acattccagcatcagggtctttccacttgctgttcccactttgggaactccattttcacagttttcaagtagctctcacactttggctctcacgtctcagctcaaagaacatcttagaaaggccttctgtggcagagccagcaggatgtttattgactgcctagaccaggactacatttcccagaggcccttgcagctagttgaagccataagacaagttatgttcaatggactgagagcagaagtgatgtatgtcactttagggtgaagactttcaagaagcaggtgcgagttccttattctctcttctgcctggattcaaaagactctgagcccatagaagatggttgaatcaccttatggaagaagcctggatccctgaattactatgtggatcaggagaaatgtctgatgggatgttctatgagtaagaaatgagaagactcttctcaaacgtggaaggagctgctgaaaccaaaatcacaagtcctagagaagcttcttattatctctcagatggtggatgggttccaaaaagcatcctgaaattatccagaaaaacagaaaagagatttcagataaagcaaagggagagagatgctgacagaagaagaccaagaggccacaggggctctgctccttcaggatctaagaaagcaggaaggcaccagtacctcccaccaaggccaacagaacagataccatgagaaaggaaccaagaaaaggacaaatggtgacatgtctccaaaacaaggagacattgagcataagaagcagaaagtgaggccaggtgcagtggctcacacctgtaatcccagcactttgggaggctgaggcaagtggatcacttgaggtcaggagtttgagaccagcctggccaacatggtgaaaccccgtctctactaaaaatacaaaaattagccgggtatgatggtgcatgcctgtaatcctagctacttgggaggctgaggcagagaattgcttgaacccaagaggtagaggttgcagtgagccgagattgtgccactgcactccagcctgggcgacagagggagactctgtcacaaaaaaaataaataaataaaagcagaaagtggccaggtataatggctcatgcctgtaatctcagtgctttgggaggccaaggtgagaggactgcttgaggccaggagtttgagaccagcctgggccacatagcgagaccccgtctctacaaaaaattaaaactgaaaaaaatctagctgggagaattggctcaagtcccagctactaaggaggctgaggcaggaggatcacttaagcccaggagttccagcatgtgatgagccgtgatcgggccatggctccagcctgggcaacagagtgaggtcccatctcacaaacaaacaaacaaacaaacgagaaagcccaggtagcaatgagaatgagacttgcccagacaggcaccccgggtgactgctcctgggggtgcaggccatccattgtcctttggtggtgtctcagtccaaaggcaattgtgaccaaatcacagggacagatcaagtcttctcaaagcagagactggtgaaactttccaaatcatggcggtagggcacgccttgcatgttactgagaacttcctcctctctcttgactttgcagtctgagacccggtcatatctacatgtgtgtttggggcaggatgggcagagacatagcaggaaaggaagtcacaggggtgtgtcctaccccagccaggaagcaggcagcagggaccgctgtggggcatgcctggaggttcttcaccatctgctgagcaccagcataacaatgggacattgggactgtccacctgcactgtgctgttaccactaaccagacaactggctttcgtgggattcaccctgggtccctggggcagaaagcaccctaagtgctcagggccttcctctgaaggggtcactttttccttcattgtcttgggtgatgtaacaagctgtgccagactggaggaagtgagaccaggtgcctgcagtgagctactgagacgcaggtgacagtcacagcagttgcattatcagggagtttcctatggtcatctgaacttcgagggaggttttctggggccgggcattccttcctcattcccatttacctaaattggcccatccttgtctggtaggtcagcacccagcagaggcttctccccatgcacagcactgtgaggttcaggcacctgggcacagtaaccacagtgattcctggaagctggtgggcatgctatcctggggccatctgaactgggaaaagctgtgtgagttcttgggggccagcttgtagcctttttggctggggccaggttgaaggtcttcctgggaaccagagtcaagagcggccacttacattaagcggataaagcccacgactttcttgagctgcttgacagctgtaccaaaaaggcacaaacccattgaggatattatgaaacatgaatacagatgattattttattttggtttggttttgttttggctttgagacagggtcacccaggctggagtgcagtggtgccatcatagctcactgaagcctcaacctcccaggctcaactgatcctcctgtttcaaccccccaagtagatgggactacaagcgtgcaccaccacgcctggctaattttttttaatttttaatagagacaaggttttgctgtggtgcccaggtgggtctcaaattcctagcctcaaacattcctcccacctcaaccgcccgaagtgctgggattacaggcatgagccaccacgcccagccattgccttataattttttactgatgtcagatattgttaattttacagtgttggatgctggattttttttaatctctataaatattcttgaattttgttctggaatgcagctaaataatagcttgatcctttcgggccttgcttttaagcatggttggttagtcagcatcagagaagtatttcatctagggcaggggcaggggtctccaaaccccaagccgtgaaccaatacaagtccatggcctgttagaaaccaggctgcacagcaggaggtgagtggcgtatgggtgagcatcactgcctgagctccacctcctgccagatcaggagcggcattagattcttacaggagcgcaaaccctattgtgaactgtgcatacgaaggatctagattgcgcactccttatgagaatctaatgcttaggcggggcatggtggctcacacctgtaatgctagcactttgggaggctgagatgggctgatcacttaaggtcaggagttcaagaccagcctggccaacatggtgaaaccccgtctctactaaaaatacaaaaattagctgggcatggtagcgggcgcctgtaatcccagctactcaggaggctgaggcagtagaatcgcttgaaccccggaggcaaagattgcgctgagccgagatcgggccactgcactccagcctgggtgaaagagggagacttcacctcaaaaaaaaaaacagggaagaaaaaaaaaaagagagagagagacagagaatataatgcctcacgacctgaagtggaacagtttcatcccgaaaccatccactgctcccaccctccatcccccagactgtggaaaaattgtcttccatgaaaccagtccctgatgctcaaaaggttggggactgctggtctagcgcagacctctcacacctgctgtgtcccaaattgacccacccctgctgcttatttttaccacccctacctggtggtgcgtctgtctccccactcaactgtgagctccgtacaatagggaccagggctgttgtggtcaccatggtgtccccagcatcacccagcacagggtcagctccctgagtttatggaatggtaagcacgaatgaatgggaaaacgcatgccagggaaatgttagggtcatgctctctgcccctaccctccactcagacatgagacacctgtttctgaaatcaaagagcagtaagtccaggatctcattgcctggttccagtcctcctaggacgcaagtcccattttgtcaagaaaataaagggggtgagcgtggtggctcacgcctgtaatcccaacattttgggaggccgaggcgggaggatcgcttgagcccaggagttcaagagcccagaagctgagactagcctgggcaacaagtgagatcccatctctattaaaataaaagtgtttagttaaaagaagaaaaagaaaataaatggaagcatcaaggactgttttgcctctttcgggttagctggtagtgagcgggagaacgagggaaggcgggcggggctgcagtctctccacgcccttttcatttccactcaaggagacctacctgggaagagtgagcgctgcaagacccagcctgaccgcgctaagattactatgcagcgcccgagcccgctgtctgcccggcaaccgatgacgtcactgttggcgcgcccgtgacgtcagaggcgggcgccacacttgaagaggctgagggaggcggtgtcgccgccgcggcgctgtcatggagctagcgcaggaagcgcgggaactgggttgctgggcggtcgaagagatgggggtgcccgtggcggcccgggccccggaatcgacgctgcgcaggtgaggaccgctcctggagtgaggacaccccaccctggagattgagtctccgggagtgagaactccacccctcattgaggactcgactccccccaattccccatcgagagtgacccgacttactgagggctccctaccctgggaggctccccagagtgaggtccctagcactggtgaggatcctccacgagttagctaagacctcgctccttatggaaataggatctccagagtgaggctgtccccgcagcacctcccctccctcccttaacctaaccaagaaggacactcaggagttagccgtggccaccccatcggggattgaagctgtaggagtgatgccccacgtctggtcatgagatggcacttcctggcagtacatcccccacctccacctctggatgtgactgggataacccactcccaggagaaagggagcacccgcctctcccgcgctcccccaccacccgccttcccagggaatgagaataacaccacacttagtgcaaacatccagtccctacaaaaaaaatgttttaccaattagccgggtgtagtggtgcctgcctgtagtcctagctactctggaggctgaggtgggaggatcgcatgagcccaggaggttgaggctgcaaggagctatgatcgtaccactgcgacagagcgagactgtctcttaaaaaaaaaaaaaaaaaaaaggcaaaaaaaagtttgggccttccctcctcaagaagtgagaactccctagtaaaaactccctaccaccatcaccctaggaatgaggatcccacaccctgtgtgctgccccaggcatatgcttacacactgtccccacaggctgtgtctgggccagggggctgacatctgggcctacatcttgcagcatgtgcacagtcagaggtaagctgggctagagcaggggagggggcacaggtgaggcccatagtaactcctctttctgcctctgcactgtaggactgtcaagaagatccggggaaacctactctggtaactgcttcttaaagctatcccctcctgtcttccccactcccatttagccctgtccccaccacagcatcacacctattgccctcccccctagaagccccactcatccgctgactctggcctcgttttcctaggtatggccaccaggacagtccacaggtgagaagcatatgctacaagattctctttcatccgaaaaatgacttgtagatcttctgctctaagcccaaccaggtgctgggtgatgctggggacaatgggtcacaagacagccttgatctccatcctcatagggcttaaagtccagtggaaacagcattagctcagccaggtgcagtggctcacacctgtaatcccagcactttgggaggctcacctgaggcctcatctcaggtgatgagatcacctgagggctccaggaagcgatcagtactgggacaaagatgtggtttgggaggcggatcacctgaggtcaggagttcgagaccagcctggccaacacggtgaagccctgtctctaataaaaataaaaaattagccaggcgtggtggcacacgcctgtaatcctagctacttgggaggctgaggcaggagaatcgcttgaacctgggaggcagaggttgcagtgagctgagatcgcactactgcactccagcctgggcaatagagcgagactctatctcaaaaaaagaaaaaataaataaagagcattaattagctgggcgcagagaggtgggacctggatatgtggcatcaaagctggtgagaagagatgatgggacaggtatgggagagatgctgaggccagtgtgggacccaatgggtgcaaggggctcatatgacacctaaggggaggcttccaggaggccttgggacttctaggtgcagggctccgggaagagatcagtactgggacaaagatgtggttgtcaccagcacagacaggaaacaggctggaagtgtgggtaagacaatcctaggaggaaggagggagggagccaataccctaatgcttctgtgtcagacacagaaactgctgagcaaaaaccctctgccaccagttgaggagcctggtacccccaaaagacaggccaggctgagccccgatcagaccatctgaccctgaatctgatcctcccaggtccgtcggaagttagagctggaagctgctgtgacccgcctgcgggcagaaatccaggaactcgaccagagcctggagctgatggagcgagacactgaggctcagggtgagccatggggccagaagatgggcaccagaatgtggggcgggaaaggtgctgatggccacccctgttcctcccacagacacggccatggagcaggcacgtcagcacactcaagacacccagcgtcgagctctcctcctccgggcccaagctggggccatgcgaagacagcagcatacgctccgagatcccatgcagcggctgcagaatcaactgaggcgcctgcaggacatggagaggtgggcctcagggacccaccctcaccaggctgggtggccagacattctcttagagacctcagggctctgccctgatcccttcttgggttccagaattctggaaccattaggatggaatgtccatgaggccaggaggttttgtcatctcagtcacctgtattttcagtgcctagaatgataccacctgtatacctagaacaccagccctggggaaacagccacaaacagagaacatgtccctgccctcctggagcttatgctgtgacacagagaagacagatagtaaagtaggaaccaaacagaccctatcatttctggtagagatgagtgctgtgaagaaaagcctatcatagaagggagagggagatgctgccctagcgagggtggtcagcgaaggcctctgaggaggggacattgagttggaagaggaatttctgtggagaaggaatagcaagagcagaggtggtgtgctcagcatgcaggaagagcagcccggaggccaatgtcagctcaagtttctcaggcaagaccgagaacctgaggaggtgaggtcgaaggagtggacagagaactgtggatgatgtgttgcgattttaccctgacactggttcatgccctggcttggccacttaaaattgggtgacctaaggctgggcatggtggctcacacctgtaatcccagcactttgggaggccgaggcaggcggattacttgaggtcaggagttcgaaaccagcctggccaacatagtgaaaccccgtccctactaaaaaatacaaaaattagtcgagtgtggtggcacgtgcctgtagtcccagctactcaggaagctgaggcaggagaatcacttgaacccaggaaaaggaggttgcagtgagcctggattgcaccactgcactccagcctgggtgacaagagcaaaactctgtttaaaaaaaaaaaaattgggtgaccttgggcaaggtatttaacttctttctatgtgcctcagattctaagatctgtggaatggggataatattaataccaagcttatagggtaggcatgatcgttaggtggaataaatcatgtgaagtgcttagagaagtgcctgttaaccattgttattctgggtttggtttttttgttttgttttgttttgtttttttgagacagagtctggctctgttgcccaggctggagtgcagtggcatgatcttggctcactgcaacctctgcctctggggttcaagcgattctcctgcctcagcctccccagtagctgggattataggcgcatgccactgtgctcgactaatttttgtatttttagtagagacggggtttcaccatgttgtccaggctggccttgaactcctgacctcaagtgatccacctacctcagcctcccaaagcgctggggtacaggcatgagccaccacgctgggcccattgttattctgaatgcgctggggaaacatcacattattttggacagatctgagcagggacatgatcttcctacagttttaacagaatcactgacttctgggtggcaaacagtctcgtggagcaaaagcagtggggaggctaatgcaatattccagctgggaggtgacagtggcctaatctggagatggctcccgagatctaggcttagtgattcctctgaccggccttgctggcagtgagaggagatggggcacagacatctgttctcccagggaccccagccccagctgcacttctccctccaggaaagccaaagtagatgtgacctttggatccctcacgtcggcagctctgggcctggagcccgtggtcctggtaagagtcctggtcatgggagaaggggcagggagcctggagtcaggcagatgctagggtccccctcaggtcccttcctcctcttctccctagcgtgatgtccgaacagcctgcaccctccgggcccagttcctgcagaacctcctgcttccccaggccaagaggggcagcctcccgtgagtgtccctagcccccagagaccctgtaaagaccctgggttttaagtgggggtctcttatttattaattcctcagacactgagcttctgggctacgttctgtagaaggggacttccaggctgggaatagaaggagacagtctctcatcacaaacagtgacagccaggtggtcagggctgttgcgggagtgaggaggcctgagaggctctgggcacccagaggcagtgcctttcccagctaagaaggcagggaggggagaggttctctggtgaggaggcttagctggggtgaagggtccagagagtgtcccagatgaacaacccatgtaaaggccccaaagccagcaggttggtataattggggaactcaagtctaacaggcatagggaagatgacagcccctaccttatagggtggtggtgataactagaggataattgacgtgtcttgtaacgttctctgtccgcttacccaaccccacagaacccctcatgatgaccactttggcacttcgtaccagcagtggctgagctcagtggaggtgagagggcagggctctcaggaaagccacaccctcccgctccttgatcaaaacttagggtgccaggacctaactcttgatgacagccctattcccatggggtctcagctcacagccctgccccgatcctgccctgacttcaccctccctccccctagacgctgctgacaaaccaccccccaggccacgtcctggctgccttggagcacctggctgcagagcgggaggcagagattcggtccctgtgcagtggggatgggcttggcgacacagagatatccaggtgtggggcagggtattctcacagttggggaaggccatgtgagtgggtgagctgggacagcctcaggacccctggcccagccacctgctgatggggtagaactgaaacccactgcctggtggggtggcaggactgatactgtccaccctcgagtaccaaggcaaggccgcagcacggctccctcagcagctcttcccccaccccagaccccaggccccggaccagtcagactccagccagaccctgccgtccatggttcatctcatccaggtgaccccagggctcgcctccccaccacattccaagacttccttaatcccctcacccatggatcatgccctgggtgtaccctgattctgtaccccgcttgcaggagggctggcggactgtgggtgtgctggtctcccagcggagcaccctcctgaaggagcggcaagtcttgacccagcgcctccagggcctggtggaggaggtggagagacgcgtcctgggatccagtgagaggtggggggctctccgagaagaggtctctaggccatctcgcttctgagtgtctcagcccattggactttttcagcctctgtggctcctatctctgcctcctctccctgcagtgtctctccctggtttatggtcccttgtgtggctcagtcacccttctctcctttgctctcctccacttgccctgcaggcaggtgctgatactggggcttcggcgctgttgcctgtggacggagctcaaggccctgcacgatcagagccaggagctgcaggatgcagctgggcatcggcagctcctgctgagggagctacaggccaaacagcagcggatcctgcactggcgccagctggtggtgagaggctaggcccagggccttgtggagggccagaggggaggcttgaaaactatggctaagaactgggcctgagccctgtgtggtagcacatgcctgtggttccagcactttgggaggctgaggtgggaggatctgagcccaggagttcaaggctgaagtgaggtatgatcacaccactgcactccagcctgggtgacagagcaagatgctatcacttaaaaaaaaagaatgctgtcacttaaaaattaagaactgggcctcctaggcaagagcccaggtgagactcccaggcagaagcaggacctaagcagagaggcacactgaggctgggagctgggaggagtgggtctcagggtatcctggttcctcaggaggagacccaggaacaggtccgcctgctcatcaagggaaactcggccagcaagacccgcctgtgccggagcccgggggaggtgagatgggagttggggtgaggtctgggtagggctggatctgccaggatggggctgggtggacttgtgatgttgtgatgccccacccacccctccccttccccacaggtgctagctctggtccagcgaaaggtggtccctacatttgaggcagtggcaccacagagccgggagctgctgcgctgtctggaggaggaagtccggcatttgccccacattctgttgggcacgctgctgcggcacaggccgggagagtgagactggggctgccccacccctgccctgcatcccctgccatgggtgactgtcactccctgaacctcctcaaaaaagataaccccagacccccagtgttcccaggctgccagacctcacccttgggtcagcagccctggtcttggcatcctagtccccagacccaccttgaagttcctgggcccccagagcctccagaacccaaggcctcctctcagtccccacccaacccagacttctccccgcccgtaggttgaagcccctgcccacggtcctcccatccatccaccagctgcaccccgcgtccccaaggggctccagcttcatagcgctgagccacaagctggggctgcctccagggaaggtgagtgcccgtctcctgtgacttgtctccccagccccgccccaggtgaccgtccttccctcctcctccaggcctcggagctgctcctgccggcggctgcctctcttcgccaggaccttctgctcctgcaggaccagcggagcctctggtgctgggatctactccacatgaagaccagcctgccgccaggccttcccacccagggtaggtctgccctgccaccccatccagcctccccgcccattcccactaccagcagcctccacgagtccttaccagcaaccccgttgtttacgcagtgcccattgtgtgctaagggctttaaacattctcccttgtttcatctgcacggcagtcccataaggtaagtgctgctgttctctccattctacagagaagggaactgagacgcagaggttagtaggttgcccaaatggcaaagctggaatttgaatccaggtggtctgaaatgggtctgtgctcccaaccactaagctacactgccgtcgactttccacgtgttcattcatcaccgtcacatagtatacctcagcagttcaaagcctgggaatcctctctgccgtctcttcctagctgtgtggcctccccgtgccttagcttcctcctcagtggagtaagcatgaagcaatatcttaccgaggtgctgggcagattgaggcaggggacccacacagggcactgaacactgcctgctatgcagtaagcaccctgtgtctccaatgtgattagcatcattgtctgtgtacacacacagtctcttggagtcatgacgatgaggaaagggacttttaagaaccccagtttacagatgaggaaactgaaggttagagaagtcattcattcctggattcactcaccaaatactgggtgtctaccaggtgccagcccagatggcttgatggggagtgaggagaaaggtccccaccccaggggtttccccagatggaagtaaagagtaaagaatgaaaggataaatacatggaagaggagaattgatgagaaatgaaccggcagtgccagcagcactggaggaagagactgttcaagcctctgagtttggggctccctgccctccacttcttcacaaggggagggaacagtgtgcaggagcaatgagagcagccccagaccccacacggcctctgcccacctcagcctctgcctaccacgccctctgcccacctcatgtgttttttgtttttgcttttgtttttttgagacaaggtctcattctgtcactcaggctggagtgcagtggtgccatcctggcttactgcagcctcaacctcctgggctcaagccatcctcctgcctcagcctcccgagtagctgggaccacaggcatgcaccccacacccagctaattttatatttcttataatcatgggcatcttgaactgtacacatctatcatggaactcctggttctctctactccaaaaaacaattttgttcctcttcttggtttccttccttgttaaattatctcaccctcctcatccaagtgctgcacccagaaacccaggagtcatcctgaatttctccatcaccctaatccccccaccctcaccagcttcagcctctcagcaagccctaagggtcccatccccagagttctcccatcggtcccctgccccagtaattccacctgacagcagacggagctgaacaaagagccagtgtcgtgatcaaggtcacagggcagggatgggatggggtcaggattcaggcccagcttgtctgatcacgctgctcgtctgcacttgctgagctgggcctgttctgtgcacatggagaggtaggcccagtcccagtcccagaggaaagcaccgctagggtgaagctagagcaggcggaggaggaagccttggagcgagagtgttggaggggcctccaggaggaaagatactctctactgtgggccctgggaatcggccaggctttgccacatcatgaaactcaaatacctgctgaagggcttggactctgccttgggggcactggagaaccttggagggttctagacaggagggagagcatcaaatttaggcttcaggaagatcactgtggtgtagtgcggagggtgaaccagagcaggagactgaggcctggagcagaggagaggaagaaacgctcaggagactgagcggacaggccatggagattgatgggctctcacggggagggaggaaggcatccagaaggaggcctggatggggctgggggtggtggactgcccttgagatgaggatctgggaggagggacaggtcctcatctcaagggcagtccctcagaaggggacttccaggctgggaagagaaggagacagactcatcattggtttgcgggagctgctgaggtcaagactaggggactggagaattggggactcattgctgtaaggtaccagcgagccagaggactcaaagctgcctcctggctttctcaccctcagagctgctgcagatccaggcatcccaggaaaaacagcagaaagagaacctggggcaggctctgaagaggctggagaagctactgaaacaggcactggagcgaatccctgagctgcaggggatcgtgggggactggtgagaggggaacgtgccgcggatgggaaacagaaaagtcaggactcaagctgggggcctgatgagaaggagcaggccatggttttgcagggagggtctggagggtcagtcctttcctcgttgacgccatgccattccccaggtgggagcagccaggccaggccgccctctctgaggagctctgccagggcctgtccctgccccagtggcggctgcgctgggttcaggcccagggggccctgcagaagctgtgcagctgaagagagggttcaaacggaagccgagaacttgacactgttcaccccaacacctcacctcccccaggacatttggaagaaagcagcgccaggattcctcggcagtcgtccccacccgcacctgcagtcccctcatgtgctgttctgctgccccactcagctcctggaccctgtcctttcatcccgctaaagcaccccctaaaaccccttcatcactttcattctcagcaaaaagtaattgagcacctcctctaggcgctggggagtccacactgaacaaaagaaacagaaaaccctgtcttccagcagttgagttctagggcagggagacagagtttacaagataaggaaaatatatatgtagtatgctgcaagttaactgctgtgtgggaaatccagcagggggtgggatgtgtgatttgaattgagggccacactgcccaggtcgtgctccgtcaaggggtgagcaggagcaacaggggtggctgagtaagggcttgcagctggaggcaacagcacatgcaaaggccctgagccaggatgtgctgcaataagggccactgagggggacagtgtaggttgggggtgaggaatgtattaaaagatgagattgccttctagtttgtatagtttctttttttacatgtaaatcagccatttggaatttatcctagcacatggatccaattttgtcttattttacatatatcctagtagcacttactgaaattcccagtcagagtggcagttgcctctgagggaaggtgggtggcagggatcaactgaggaggagacacagaaatgtcctagctgatgggaatgtgctgtgtcaagagcagcggcggtgacgcaggtgtagagatttgtcagagctcatgtagttgtagtcttaaggcctgtgcatttcactgcgtgggttactcaatttataaagcaaagcccttacacttttgagatgccacctttttatgcactaaatttccatgtttaattgggttatatctggcttctctccagacctgctttgtatttaactctccatgtgtcattcctacagtagcttaatagaaaggcttgtgacacattgtcatatctgttcttgttttcttttgttttttttttttttttttttgagatgcagtctcattctgttgcccaagttggagtgcagtggcatgatctcagctcactgcaacctccgcctcccaggttcaagccattctcatgcctcagcttccccagtagctaggattacaggtacgcaccaccacgcccagctcatttttgtacttttagtagggacggggtttcatcatgttggccagactggtctcgaactcctgacctcaagtgatctgcctgcctcggcctcccaaagtgctgggattacaggcatgagccaccgcgcctgaccacattgccatatctgaaatggctggattctcttaggtgcttttctttttctttctttctttctttttttgagacagaatctggctgtttcccaggctgaagtgcagtggcatgaactcagctcactgcaacctctgcctcctggattcaaacaattctcatgtctcagcctcctgaatagctgggattacaggcacccaccaccatatctggctaatatttgtattttttgtagagtcggagctttaccatgttggtcaggctgctctccaactcctggcctcaagtgattctatcgcctctgcctcccaaatcttcacctgctgggattagtttcccctgtctcagtaaattttttttcccaaactaagtgaacattagatttaatttggctggccccagaagaaaaacatgcacagatggtagttttactggtgttgcagtaagttttcaaatttggaagtttggcagctttatgatcttgaaccttgctgtccatctctcacacaactcctctcttggcctccagagtccctttactctcccagctttcctcctgcccctggctgctgtttcccagcctttccacattggctttcccatgtagtccttagtgtgtctgctcctcctctctctcctcatcacagttcccagcccccaccttcaactgaactcaacaaaatcttcaacttcatacagtagtcacattgttagtaataacactggcatttttattttgataaaatagaccgtttaaatttttgagattctaccttatattttttgaattatatactaaagcaaataagtagtgatgtaatgtcattggggaccaagatttttagtgtaaatgaaaaaagataacaaatataaactcaagtaaacaccctgtagtctttcacatgaattggaaatatcagaataaagtcatgatttttctctttctaaaaaatatgtatttccctagttaagtcccctgaaaaggtctaaatataatgacaccccagtaacactgagcagcactagtatacagactgtggtctctataagtgccatttctgactaagaactagggacttttgtgaaaacagctgattccaggtctggggcaagaaatgtgcaaaatgtgtccaggatattttgtgccaggaagcaaagagtcctccaagactactgtggccaagtcaaaggaactcaggagccagtctgaagggctgtcactcaccaaaggtgggacatgttgagcagcaaaaagaaccacagtggtttgaagcacatcaaatatgcctgaatgtgtaagttcatgttgatactcatatacctcattgaaatcacctttgaagagtactaggaacccactcattattttgaaaaattttttatatataaaataatccagcatgttctctatttttcttatatgtgaacaagtaaccaacttttttttttttttttttttgagacagggtcttgtgctgtcacccaggctagagtgcaatggtgagattttggctcactgcaacctccgcctcctgggttcaagtgattctcgtgcttcagcctcctgagtagctgggattacaggtgcgcgccaccatgccaggctaatttttgtatttttattagaggcggggttttgccatgttggccaggctggtctcaaacttctgacttcaggtaatctgcccgcctcagcctcccaaagtgctgggattataggtgtgagccactgtgcccagcctaagtaaccaaatttctgatgaagaggttatttatggaagaatcacaactaataacttcagagaaaatactagaattcaaaaaccactatttgctattaattaatctagtgatggatacaggtaatgatgatcaagggctactaaaactattaggggaaaggttgattgggcttcttaaaataggtagaccaggatgacaccactgatcaatcctgatgccaaaggaaggcaaccagacatcttgtgcttctgatgggatccaataggatacaagggatatgataccatacaatattatctatgaagtgtgcttttaccaaattaaacctaaatctcatctagccttagctctcactacaagcatatgggaaaggggcagaaggcagtcagaaacaagtgaaacaaaaaggatgtaattagttaaattcaaaatgtgtgacaccctataggataaatgatccagtttcttcaataaagagaaggcaaaagggggaatggagaaagaaagaagaaagggagggagggaagaagggaggaaggaaggaaagaaagaaagatggcaggcaggcaggtattcatttgtactgattcatactgcagcttcaagaaaccaaggcagccaataaaattaaattttcttttttttttttttgacacggagtctcgcactgtcactggagtgcagtggcacaatcttggctcactgcaacctccgcctcccgggttcaagcgattctcctgcctcagcctcccaagtagctcggattacaggcgctcgccaccacgcccagctaatgtttgtatttttagtagagacggggtttcaccacgttagccaggctggtcttgaactcctgacctcgtgattcacccgccttggcctcccaaagtgctgggattacaggtgtgagccacctcgcctggcctctaagtttttcttgttggtaaacatctgagcaagcaaaaatttaagttttgacaggaaaaaaaaaagacaatcaaatgcaatatttggaccttgttttgatcctgattctactatcgtataaagacatttttgagacaaggaaaactgaacacggtctgggtgttagatgatactaagaaattaatttgatggtattcataatggcatagttaatggtattttttttttcttgacactgagtttcactctatcgcccaggctggagtgcagtgacgcgatctcggctcactgcaacctctgtctcccgggttcaaacaattctcctgcctcagcctcccgagtagctggaaccacaggcgcacgccaccacggccggctaattttcgtatttttagtagagacagggtttcaccatgttggccaggcgggtttcaaacccctgacctcaggtgatccgcccacctcgacctcccagagtgctgggattacaggtgtgagccactgagcccagcgttaatggtattttttaaaaatagttcttatcggccgggccgagatcgcgccactgcactccagcctgggcgacagagcgagactccgtctcaaaaaaaaaaaaatagttcttatctgttaaggagacataatggcgcatttatgactgagttgatgtctggaatttgctttaacatactccagcaaaaaaatataaaaataagaaaagtataaggccatgcgcagtggctcatgcctgtaatcccagcactctgggaggccgaggcgagtggatcacttgagatcagaagtttgctaccagcctggccaacatggtgaaaccccgcctctactaaaaatacaaaaattagccgggtgtggtagtacacacctgtaatcccagctactagggaagctgaggcaggagaatcccttgagtccaggaggtggaggttgcagtgagccgaggtcacactactgcaatccagcctgggcgacagagcgagactccgtctcaaaaaaaaaaaaaaaaaaaagaagaaggtactttgtaacattctccccgcccttgagaatgtactttataagcctatcccaaacctgtaagaactaatgataatcccaccaccctttgctgactcctttttcggactcagcccgcctgcacccaggtgaaataaacagccttgttgctcacacaaagcctgcttggtggtctcttcacacggacgcgcgtgacaaagaagtatagatcaagtgaaatccagaagtgttgaatattggtagcgtttgagatgtacttaagagtgcgttatactattccccttaatgtgcatgtttgaaaatactcagaataaaacacttgtgagggctacgggaaaaaaaaaagggtcagctgtggcccaagaaaggacagggaccaagcccacggacgtgctcctctgagttgcactagtctctgggccttggctcccaccctgaacagctctcatctttaaatgtcttcagctgtcctcctccaggaagccgggtcaggcgcttcctcccgggcgtctccggtcttcctggaaaccacaggtcgggtgtcaacctactccaggataggggccccgaggggccagccaggcctcccagccttgcccaaccctggggttgacacggactttagcgtctttttaaacttccggcgcgggctctgcggtggcacaggagggtcctccaaactttcctgcgatctcaaaggtccagattccacattggggatgggcccaactgactttgcttcgctctcattagccggtggtcctccaggaaagcggggccgcctctccgctgtgctctcataggcccaggttcttgcgttcgtgtgtccttctctcactctgattggcctatattccccctgagggtgtggccaaatctcattggctctcgcgcccgaatgtatgacgtcatgcgccagcgcccgtcgcttttgctggacgtcatcctcgggagcccacccggacgaagggggagagtagacagcagaaccagcggcggcggctaagcagagactgtagtagcggcgacagcgacgacggcagcgatggctggggcggggccagccccgggactcccgggtgcaggaggacccgtggtcccgggtcctggcgctggcatcccgggcaaaagcggcgaggaacgcttgaaggaaatggaggcggagatggccctgtaaggcccgcgacagagagtgataaaagtcgtcccagagccagagccaccgaatctcggagcctccaggcctcgataggccggagatacggctctaacatggggaagtgggaccttcgggattgtgggggcggggataggggagaggttggcaggggtgagggtcccctcgcgatatacccacagttccaaaattggtacgaggtcctgagcgctgatgtctgttctactcctccaggtttgagcaggaagttctgggggctccagtacctggaatcccaactgctgtgcctgcggtgcccactgtccccacggtccccacagtagaagcgatgcaggtcccagcggctcctgtgatccgcccaattatcgcgaccaacacataccagcaggtacggctgagctaaggcatgtaagtcagggaacacaatgcctcgaacagagtaggtgtttgtgtacagagagctgttgacgttttggcttgttgactaattagcatgacaaatattttatatgccaggcactgagaacacagtaatgactgagagagacatttctgccctgtgggagcttatattctagaacatgttgtccagtagagctttctgcaatgacgagactgttctgatatatttaaaatttatatttaatagttcgttattctcattagtcacatttcaagtgctcagtagccaactatatatgactagtagagaaagagagagaaattattaagatgaaaataggctgggcgctgggcgtggtggctcacacctgtaatcccagcactttgggagaccaaggcgggcagatcacgaggtcaagagatcgagtccatcctggccaacatggtgaaaccccatctctactaaaattacaaaaattagctgggtgtggtggcacgtgcctgtagtcccagctacttgggaggctgaggcaggagaatcgcttgaacccaggaagcggaggttgcagtgagctgagattgcgccactgcactggagcctggtgacagagcgagactccgtctcaaaaaaaaaaaaaaagccctgaggcaggtgcatacctgttgtgttgttgtgttcaaggaacagcaaggagaccagtgacagtggagtgagcaaagaggaaagtgggaggagataaggacagagaggtgaggccaaatcttgtagagccttatggccattttaagaaccctggtggccaggcacggttgctcacgcctgtaatcccagcactttgggaagccaaggcgggtagatcacaaggtcaggagttcaagaccaacctggccaacatggtgcaaccccgtctctattaaaaatacaaaaattaggcgggcgtgtcggcgggcgcctataatcccagctactccggaggctgaggcaggaatatcacttgaacccaggaggcggaggttgcagtgagccaagctcgtgccactgcactccagcctggacaatagagcgagactccgtctcaaaaaaaagactgtaagggacaagggcagaagccaggagatggaggaaggggctagtacagtaatctagacaggagttaatggtggcttggatggaggttgtgcatgggagatggggaggacaggttggacacagtttcagtgggtgctaagtgctgtggggaagatgaaataaggtggtgagagaagttgctgctcagagagccctagtgtgatccaaaaagcctccccgagaagtggcattttagctaagacctgagatagccagccacatacagagcacaaagcatgaagctcttggtctcttggggtgagctggccgcagcagatgggaatgctgagtcaggcccctcaccctgacctcttcctcgacaggtccagcagactctggaggcccgagcagctgctgcagccacagtagttcctcccatggtgggtggccctccttttgtaggccctggtaagtaaagagtagcaaggtgagggggttgggcaatcaggcagggtggtaaaaaggtgtgcacaggactctcctcccaccatccttgcctctcccctcccaacagttggctttggccctggtgatcggagtcacctggacagcccagaggctcgagaagccatgttcctgcggcgggcaggtgagtctggggccagggacccccacatttaatcaggcactcttgtttacatgacttcagcctcttgcctaaatccttgctctaaattaccctttgcctttgatcccaacttgatgttgtcatcctaaagcacgaacctgatcatgtcctttctgatgatgtcaattttgttttaacctgatcattgcaaaccaaccctcctgctgtcagtcctaattcccagttaccacagcacttaacacctcataacaagctatataatttcttatttactatggctatcatcttttgcatcctctaaaataaaagctccatgaggggcagaagtctcagtatctgccacataggaagcattatgtactgtctgttgatgggatgaacggactgttgagacaagcgccaggcttttcccctggcagtcacaaccctacatgaccttgcttcttgcagggagagatccccagcagcccgaacatttctgggatgtgccagcagtgcttttgttaaggtcccttctctccctgctcactgtcacccagctgtaatcttccagccatccttcccccccaggccattttctacattccaccttttgttcttcaggtaacctttactcacactgtcaatttgtaggacattacttccttatatgtatgaaaaggatgcgtgttcttacttggatgtaaaattctggtataatctcggttaaaccaaacgtgctacttatgttacctaaatcctgttatacttattaatctgatgatctctgagaagttgtaatgtctcttactttttagtatggttttgatcaaaatgcaaatctgacctacttcccctgcccagcttccaaccctgctgtggctccccagtgccctcaggaggacacccatggctcagccaagaatgctgtgctttaagaacaaaaaagctctactggggtgcctgctggctgctcagcccttctcatgacactctctaagccccactacttctattacagttacactaaactgaaaagggaaaggttttgcttataaatattcttcctgccaataatattcccactcaccccttgcctaacacttcattgccccttgggtctcagctcacaggtccctttctccaggaagccttccctgggcctggctgggtcagagggctcccctctcttagcactgatcccactgcctgggcttccctgcttccagcgctggtccccactggctctccttctctagtgatgtctccattccctcctcctctggaccaggagctccctgagaaccctgggtctgttggtgtgtccccagcattgcctgccacagggctgagccagaggagcttctcagtggtaaattttcatggaatgaaccaggggagaggcccccacatctccaggagggctccccagactcttctccaggatttcttgatgctgagagtgcacacacacacacgcatgcacacacacaccttgtcccaagtgcccctgtcccccatgacacacacccccatctctctctcccacagctgtggccccccagagggcccctatcctgcgtccagccttcgtcccccacgtgctacagagagcaggtgaggggccagggtcatcatccctgccacataactccccccaggccctggaactccccactaacaccctgacagattccgctctctcctctgcagcagccggcccccgccctatggccctacggccccctcaccaggccctcgtgggcccccctctgcctgggccccctggaccacccatgatgctgccaccaatggctcgggctccagggcccccgctgggctccatggctgcactgaggccccctctggtgagtgtgaacagggaactaacggtcagatgtgcggtggacggggagaccatccatcctggcccaatgggctatgtctgagttggcctctctcctgactttctgtttctctaccttctcactctgcctttgtctctgtctctttctgcatctttctgtggcaaaatctgttctctccttttgtgaagggagtacagagagaaacatgctattggaatatttctcttttgattgttactgatgttcttgtctgtggctgtctctctctgcctgtgtttctccttctctgtgtttgtctggctggagactctctgcttgggtgtctcttggctgctctctggcccccaggccctttctttgttggatggaatggagatgacagtaaagtctgagcctgtgagccggcccccctcatgctctcctcttacccacaggaagagccagcagcaccccgagagctgggcctaggcctggggttgggcctgaaagagaaggaagaggcagtggtggcggcggcggctgggctggaggaggctagcgcggctgtggccgtgggggcaggaggtgccccagctggccctgcagtcattgggcccagcctgccgctggccctggccatgccattgcccgagcctgagcccctgcccctcccgttggaggtcgtccgcggcctcctgcccccgctgcgcattcctgaactcctgtccctgcgtcctcggccccggccccctcggccagagccacccccaggcctcatggctcttgaggtaagcagggagcctagcggtgaagggacagaagggacggggggcagacaggagcccaggaacttccacacagacagaccggacagcaggaggacctgggggagggaggcggacacatgtgccccacatccagaagcacatccagcccttactgtggtggcaggagggccggggaccaaaggacagtgggagaccccaataccaacccctttgcacctctcccctttcctctgcaggtcccagagcccctgggtgaagacaagaagaaggggaagccagagaaattgaaacggtgcattcgcacagcggcagggagcagctgggaggaccccagcctgctggagtgggatgcaggtaagctgctgaagctcgaggtcaggcgtggctcggccaaggtcagaccaggctgctgtccttgggctgcagactgggagggtgaaccctctcagtagggtgggcgctgttgttagcccaccttggggaggggaggctatggctcaggggctggttcttcacctagccatgggccggagcttggtggaggtgacggggacatggggctttgtagcctgttttactcatgaggtgcctggcttcagagagcattctttttttttcccaactcttaggataaaaattttttttttttttttttatgagacagagtaccactctgtcgcccaggctgcagtgcagtggcgca[131 bp omitted]aaacacccgtctacccaccacctagattctgcaattaacattttgctgtgttcacttttttcctctttgtgtatgtatctggtttctttgtttttagctcagtcatttgaagcaagttataagtgaattaatcacttctaaatatctcagtatttatctcctaagaaaagagatattttggccaggcacggtggctcacacctgtaatcccagcactttgggaggcggaggcaggtggatcacttgaggtcaggagttcaagaccagcctggccaacatggtgaaatcccgtgtctctaaaaatacaaaaaaattagccaggcttggtgggaggcacctataatcccagctactcggttggctgagacaggagtatcgcctgaacccaggaggcagaggttgcagtgagccgagatcaggccactgcactctagcctggcaacagaacaagactccatctcaaaaaaaaaaaaaaaaagaaaagagatactttttgcatatcataatactattatcaagtctaagaacattaactaattcggtatcttcttttcagtttatattcgtatttccctaggtgtcccaaaactctgttagaactattaatgtttttgccctgaaccagcatgcatgcagttttatgtccttcaattatatctttttttttttcttttttttttttgaaacggagtcttgctccatcgcccaggctggagtgcagtggcgcaatctcggcagctcactgcaacctccacctgccagggtcaagtaattctcctgcctcagcctcccgaatagctgggactacaggcgcgcacgaccatgcttggctaatttttggtatttttagtagagacggggtttcaccatgctggccaggctggtctcgaactcctgaccttgtgatccgcctgcctcagccttccaaagtgctgggattacaggcataagccaccacgcccagcctcgattatatcttaataagaacggtctctttcctgcctctttgttttgtacatattttttgaagtgtccagggcagttgtcatgtatgatgtcccaccttctgagtttgtccggttgtttgctcctggcattgcctaacttgtgcttagagtgtcccatatcacagacgccatggggcagccgtgcaatggctgaggaaggagatggacccctcctgcttcagtgtttgacttccaccccctctcctgggaccgtctacctggcccagagaagaccctagctctgtgaccttgggcaagtcacttagcctggttttgttttgtttcttcttttgttttttttttttttcttttttttgagacagagtctcgcactgtcacccaggttggagtgcagtggtgtaatcttggctcactgcagcctccgcctcctgggttgaagcaattctcccacctcagccttccgagtagctgggattacaggcacccaccaccacacccagctaatttttgtattgtttagtagagatggagtttcaccatgttggtcaggctggtcttgaactcttgagctcaagtcatccacctgcctcagcctcccaaagtgctgggatcacaggcgtgagccactgtgcttggctcacttagccttttaagcctcatattcctcatcccctcccttgtggggacagggattcattgggacagagcatgttcagtggaagcacaggcccaactcagaggcagcatgagaatgtcagctgggtgcagccatggcggaggagcaggcagcatgtccaggtctcaagggggagttagggcaggccttgccaaggaagcagggctgaggaaagatgaagcccatgttcctgaggtgccatgacgggcagccagtgggtgacaggggtccaggggaccaagggacaccaaggctcagaggaaaggccagggctagggcagagttaagggtgttactacaggaatgagtgaggtggccctggggtggggagggcagtgcagttcaaggttaaaagtaaggactggagccagatgcctgagctcttgtcttagctctgccgcttcctgcttgtgtcactgtgggcagtgacttcacctctctgtgcctcagtgtaaaagcatggttgggagtgccagaaatggaaacacccctccaggtgccagcagagctcctggcgcagggtcagtaggtgttgaccattattactaagaggtccctaggcagagactagatacctccgaaaaggtgggatcgttcagacaaggtagacactgggcaaggcctctgcatcctctgatgtcatctcttccccatccccagatgacttccggatcttctgtggggatctgggcaatgaggtgaacgatgacatcttggcacgcgccttcagccgcttcccatccttccttaaggccaaggtgatccgtgacaagcgcacaggcaagaccaagggctacggcttcgtcagcttcaaggaccccagcgactacgtgcgcgccatgcgtgagatgaatggtgggtgcggcctcccctgggaactgcaggcgcggcaggcgctggcctaagcctgacccgagcctgccttgaaccctctgtctccacagggaagtatgtgggctcgcgccccatcaagcttcgcaagagcatgtggaaggaccggaatctggacgtggtccgcaagaagcagaaggaaaagaagaagctgggcctgagatagggtctgtggccaggcacccgctcccacctggccgggcgctggctcctccctcagttctctttggaaaacccccagctgtccacccatcccctgccccaaaaccagtttcaataaatttacgttcatttccacccctggctgggcatggaagcacgctgtggggagcagggcttggcttccccacagctggaaatggcggggagccttgagagtttacccaggcaaacacccaggcgggggcttctgagcccttcctgcgcacccattccctcttcaaacctcttccacacatgctgagtgctgcttattccagaggagaaaggggggccaatggcaagggtgaagccaagctgaggcccatccccgtgtcctggctacttcctgtgttctcagcaccaaggtaggagatctaggcccttcccttctggagctcacaggcttctaggccctcttccatccagcagactctcaccaagggtctgaacagtgcttgaggacacaatggtgactaaaagtcctgggccctgcaccgttagagctcaaggtccagtgcagaaaataggcccggtgccctgacgataagagcccagagtggtcagggcaggatgggggcgctgacctgtgggtgagggggcccttcctgaaggaaccgtccacccccaagtctcctctggggctttccagcttctccagtctgccatgcccagccagctcaccatgctctaagtctcggtgggcacctctatctctgtctctgtgggtacccctccatttcttgtctctaagcttctatatccctgttggtctctgttctctcccttggagctgggaaatgaaaaaggaggagagacccacagatagagagaacagagacttggggtctgttcccctctcttcccagctccaagctggcctctgcctgtctgaagaggtgtctgtgcagggccttgaatgccaggctgagggcttaagctttacgcagaaggcagcagcaagccccaaaaagctgagaaaattcaagcagcagcaaggtcctgggcagcacagatgtgcgctgtagaaagggccctgtgaccggctgggtgcggtggcgcacgcctgtaatcccagcactttgggaggcaggcagatcacttgaggtcacgagttcgagaccagcctggccaacatagtgaaaccctgtgcctactgaaaaatacaaaaattagttgggcgtggtggcgggcacatgtagtcccagctacttgggagggctgaggcaggagaatcgcttgaacctggtaaaaggaggttgcagtgagctgagatcgcgccactgcactccagccttagtgacagagtgagattctgtctcaaaaaaaaaaaaaaaaaaacgccctgcgaccaccactgtggctggaagtctagaaggctggggcagggactgggccagaggagggagatggcaggtttgagtatggggaggagtggagggtctcccagggacacagccatcggaaccctccattaggagggagcaggttgggcaggactttgtggggcataagtcgggggatggacaataccaaggcctctcagggaccgaggtcccccaggagaggtgtcgaatttctcctgttcctgtcttccccgccttactgccccctctctgacgtcacattttccagtctggtcagagggtgagagcctccctggcaggaagtgccctttagccccctgccacctgggccagaccacccagccccaggatcctcaaagccccttccccccatcactagtcttttctacccctgaccccccttgtactgacagcaagcatagggtcacgggaggagatgggaagagaggatggctccagaaaggacgcttccaaatgcatgtgattctcacttccaagtgggagcagaacagcaggtacacgtggacatgcagagtggggtaacaggcactgcagactccaaaaggtgggagcgtgggggaagctgaacagttaccagttgggtacgttgctcaccattcgggtgcactaaaggcccaggccagtatactggatatactgacatatatccagtaaggaatctgcacttgtaccccctaaatgtttatctttttttttaatgcacacaagtcttcctgagaacaagaagagacacacacacatagaatgtggcaagcagaggtagagatggcgctgtgagcaggaggctcagaggcagagatgagaaccatcagagactgtgcagtgggaagggggacggggagaaaaccaagagacagatggagacggacaaggagatgagataggaacactcaaagacagatggggagggacagagatgtcagaagagaccaggtgacaaagcctcactggagtcaggcccgtggcaacagagacccagctttagatatgccaacctgaagaaagagggcagagagacatggagagacagacaagaggccagcttcaaggatgggaagccaggactcccttcaggcctccgcgctggacggatagagggaccagtgatgctccagggctctgtggcttaccccacactgattccaatcccagtcccactcccactccatgggacccccggtttactttactgtaaaatggaaggaggagcaatgccacccgctctccagaacggcaagtagttaatgatcaagaggctgggctggggactggaagatgccgatatgcaaaagttatttttaatggtaaatattacatacttattaaaatacagcaggatggctgggcacggtggtggctcatgcttctaattacagcactaaggctaaggcaggtggatagcttgaggccaggagtttgagaccagcctggcca[135 bp omitted]aacatggcaaaaccccatctctactaaaaatgcaaaaaattagccgggcatggtggtgcttgcctgtaatcccagctacttggaaggctgaggcaccagaattgcttgaacccgggaggcagaggttgcagtgagctgagatcgcaccactgcactccagcctgggcgacagagtgagactccatctcgaaaaatattttatatatatataggacacccagttattgaattttacgtgaacaattttatagtttaggtatgtcctaaatatttcatgtatgtatgtatatgttacatgtatagctgtggttttttgttgttttttgctgaattatttgagcaagttacagactttttttttgttgtttctttttttgagatgaagtttcgctcttgttccccaggctggagtgcaatggcatgatcttggctcactgcaacctccatctccctggttcaagcaattctcctgcctcagcctcccgagtagctgggattacaagcacccgccaccacgcctggctaattttttgtatttttagtagagacagggtttcac[135 bp omitted]gttcattttctaaatgatatctttcctcctgaataccattatcaaatctaagaaaagaattctatgatatttcatattcagttcatactccagtttccccaattgtcctaaactattacagcgcggaagggcatggggtctggagaaggagagcagtgggaggatgcctgccttaccttcccccttcatcaaatgagagtatgtattgtacttgcctcatagaaggattcaatgaaggggtatggcacagttggtttcacacaatgagccctcatttaatgttggccgttattgctactattgttattgttgaaattgttgatgtcaatattgctatgattggcactcctgggaagcagccccaggacgccctccctactgggcctggtggaggattgggtgggccttcactcctgctccacgcccccgcagttactctgccgattgtgacgtcagctgacgctgggggcgggtgggggaatctggccggaaatccctcttcctgttgcagataagcccagcttagcccagctgaccccagaccctctcccctcactccccccatgtcgcaggatcgagaccctgaggcagacagcccgttcaccaagccccccgccccgcccccatcaccccgtaaacttctcccagcctccgccctgccctcacccagcccgctgttccccaagcctcgctccaagcccacgccacccctgcagcagggcagccccagaggccagcacctatccccgaggctggggtcgaggctcggccccgcccctgcctctgcaacttgagcctggctgcgacccctgctctgacgtctcggaaaattcccccttgcccaggcccttgggggagggggtgcatggtatgaaatggggctgagacccccggctgggggcagaggaacccgccagaggtgagcgatgaactgaggactagatgcctgggtgtctgggttaggaaggacctgggggactagactcccaagaagccgggggcctggactcctgggtctaacagaggaagagagctggggtccctcactcccaggaccaagattttaggctcctggggaaggagggagcggaggcctggactcctggctctgagggaagctagggctggggcccagactccagggcctccaagtgtcaccagctcacccattgccatctggacttttcccgacccagaacattcagaaggccttcatcgcatccatggacctgtggaactgggatgaggcatccccacaggaagtgcctccagggaacaagctggcagggcttggtaggctgccgaggctgccacaacgtgtgtggggagggtgtccaggtggggcctctgctgaccctaaccccttatcgcctgcagaaggagccaaattaggcttctgtttccctgatctggcactccaaggggacacgccgacagcgacagcagagacatgctggaaaggtggctgcgggctgggacccctaagtgctggagaagaagcggggaggctgggatcctagggcaaagggaggaggggggcgtgcctaggttcctgggactgggtggggaggggccgcgtgcttgacccctgagggtgaaggaaaagggggcgcggggtgctgaaatacgggctggggggccataactcccagtccctgacaagtagagactagagagtgggtagttgaggggtctctttcattgctcacagtcctccctaaactcaggtacaagctcatccctggcaagcttcccacagctggactggggctccgcgttactgcacccagaagttccatggggggcgggtgagtgtggggagaggcggtgggaggtggggactggggtcccgaggcaccggggctagaggtgtagactccctgatctttgaggactgagaacacctgcgccctcaaggtggcatgacctggatccgggtcagccgggccccaagtgccagggttgagagcttagaccctagagtttttgagggggcacctgggctcccctcactcgggatccgttactcctcacagagcccgactctcaggctcttccgtggtccggggactggacagacatggcgtgcacagcctgggactcttggagcggcgcctcgcagaccctgggccccgcccctctcggcccgggccccatccccgccgccggctccgaaggcgccgcgggccagaactgcgtccccgtggcgggagaggccacctcgtggtcgcgcgcccaggccgccgggagcaacaccagctgggactgttctgtggggcccgacggcgatacctactggggcagtggcctgggcggggagccgcgcacggactgtaccatttcgtggggcgggcccgcgggcccggactgtaccacctcctggaacccggggctgcatgcgggtggcaccacctctttgaagcggtaccagagctcagctctcaccgtttgctccgaaccgagcccgcagtcggaccgtgccagtttggctcgatgccccaaaactaaccaccgaggtgagagggccgcaaagactgcggggagggcgaagctggagtcctgagccgggacccaggcacctaagggggcggggcccgggagactgacagtgagggggcgggggcttagggaccaggggctcgaaggaggggccggtggcccgcactccaggtccttggggaggagagggctaagaaactggtagtcttatagggaccaaggggatgaggacccaggctcctggattatataaaacgaaagcgataaaggcccagattcctgggtctccgagatggggaggccaaactcctaaatctctgagactggggccctggacgcttgagtctccaaggctgactgttggatctcagagaagggggggcggatccccttctcgggtcctgggtcccgagttgggaggacccggacctctagatcattgaagtggtgtgatctagggccgggaagactgagtgtgcccctcccttcatcccgcaggtcccattcagctgtggcagttcctcctggagctgctccacgacggggcgcgtagcagctgcatccgttggactggcaacagccgcgagttccagctgtgcgaccccaaagaggtggggcagctcccctgcccagccaaatccgccccgtctcttctagttcaatttagctccgcccaagggctaggttcaaccgcgtagccctcggccccgccgctccccggcccactcgaggccccgcccaacccttctcaaacccaatctcccgcctgtactcctgcctcaaccaacccagtctccaccgggctctgcgaggcctcgcccaggtctgcactgcacaccgcccccaggcccggccctccccactatcgccaagccccgccccttcccactccgaccgagcgggcctctgtcctaggtggctcggctgtggggcgagcgcaagagaaagccgggcatgaattacgagaagctgagccggggccttcgctactactatcgccgcgacatcgtgcgcaagagcggggggcgaaagtacacgtaccgcttcgggggccgcgtgcccagcctagcctatccggactgtgcgggaggcggacggggagcagagacacaataaaaattcccggtcaaacctcttcgcgcgtgctcctctgcagcattcttcccgctgatactgactacagcagctagggagcctaagtgtgcagctccacatgttggaatttggcctccccacctcggagacccaggcgtctgggccttcatctctttcctctcacatgatccagaggcctggatccttgctcgctaaaagactgcagtgtcttagtcctcttctccctgaagaccctgaagtgcgggccaccagccccaagtcccttaagctcccaggtccctaagccccgccccacgctgtcagtttccccggtcccgcccccttaggccccgcctctcgactccgccttcactccctccgcaatcttcgcggacctccctcctcggtggttagttttgggatgaggaaccacccacctccagtgctgcgcaatgatcaaaggagacccagactcagggagcctgccatgtgcccgccctgtgatgagagaggcaaagaaactaaacccaaagcccatagggcctactgtgtccctgccctgtgtcgggatttgtaaaggaatcagacccaatcatgagagtatatctgctgtgtccccttgaagagaagactcagaccctgaaaagggcttactgtgctgtgtgtcctcccagtgcaagggatcatcaaagaattaaaactagtgcttgcaccccaacaccactcactctttccccactccaagctggaggacacaggactcagacctacactgtaaagagagcctacgccattctgagagccactgagcccctaaagagagcctgctgtctgtgagcgatgcgggggatacagcagggaccaagacagccctggaccctccccttaaggagctcacagtccagtgggaagacagacccatcatcagagtgttttgacctgggatgagaagactccaggggactgagggaggccaaaaggagagacctgatctagcccaggaggagaagggtcaggggagactccctggaggaggagacagctgatttgagaagtcaggtaggcaaagaatgtttcaggcagaaggaacaacaagatcaaaggcccagaggcagacgatctcataccactgctcaaaactatcagtgtgggccaggcatagtggctcacacctgtaatctcagcattttggaaggctgaggcaggaggatgccttgaggccaggagttccagaccagcctgagcaacataggggagacccccatctctatttaaaaaattaaaaataaacgtggctacagcagcaacagggaccaattcataaaggatctgtgggccgtggtgaggagcctggactttgtctccagggctcctggggagccatcaagggttttgtttgtttgtttgttttttgagatggagtctcactctgtcactctggctggagtgcagtgatgcaatttcagctcactgcaacctccgactcccaggttcaagcaattctcctgcctcagcctcccaaatagctgggattacaggtgcacaccaccacgcacagctaatttttgtatttttagtaaagatggggttgcaccgtgttggtcaggctggtcttgaactcctgacctcaggtgatccgcctgccttggccacccaaagtgctgggattataggagtgagccaccgtgcctggcccccatcaaggggttttaagcagggaaagggatttggattttaggaagatctcattgcaggggatgaatacatgcatgtaaacaggtaattccacaaataatcacaatgttgatggacacagaatgtgtaagaagaggtccctgacccaattccatctggacactgcaccccagatggtatgtgagaggctttagaggccagatgggggaggaaggaaagcagttctctttcatagctccctctcctagtccctagatgcttccttcatttccacaagaaattcttgcattcagcaaatatttatagaccacttcctgtgtgccaggcactgctttagatacaatggtgaatgaataaggcagacaaaaattcttcctttatgataattcttttctgttgag[133 bp omitted]accaacatggacaaaccgcatctctactaaaaatacaaaattagccaggtgtggtggcgcatgcctgtaatcccagctactggggaggctgaggcagaagaatcgctctagctcgggaggtggaggttgcagtgagccaagatcacaccactgcactccagcctgggcaacaagagcaaaactctgtctgaaaaaaaaaaaaaaaaaaaaaaaaaaaaagccaaattggccaggtagggcagctcacgcctgtaatcccagcattttgggaggccgaggtgggcagatcacctgaggtcaggagttcaagaccaacctgaccaacatggtgaaatcccatctctaccaaaaataccaaaattagccgggagtggtggcgtgcgcttgtaatcgcacctactcgggaggctgaggcaggagaatcgcttgaaccgagtagacgcaggttgcagtgagccaagttcgtgccactgcactccagcctgggcgacagagtgagactccgtctctctctctatatatatattttaagggtagggatttttgtgttttgtgcagcgtgctttctcaacccgtaaagtgcctgatggctggatacggtgggtcacgccggtaatcctaacgctttggaaggccgaggcgggaggatcgcttagagaccaggagttcgagtccagcctgggtaacacagcaagaccccatctctataaaatgcatatatatatccaggagtagcggtgcgcatctgtaatcccagctactcgggaggatgaggcgggagaatcgcttgaacccaggaggcggaggttgcagtgagctgagatcgcgctactgcactccagcctgggccatagagtaagaccctgtctcaaaaatttaaaaaaaagaaaaaaaaaatttaaagaaaagaaatacctgacacagaaaaagcgttcaataaatatttcttgcatgaataaaagtactttcgctgggacatttttctccacacctaccctccagccagccccgggatctataacactctctccgagtgaagacacagaggtgatgagatcgggtaacccacgggcgcccgagccccagccgcgcaagctcacgattgggccagaagtgaggatgaacaagcatttagcccaatagaaagtcgtagttctcttgctgggcgtggcttgaatgacttcagtggcctcctcctgggagggagctgaagccgctcgcaagactcccgtagtccccacctctctcagcttccggctggtagtagttccgcttcctgtccgactgtggtgtctttgctgagggtcacattgagctgcaggttgaatccggggtgcctttaggtgagtgtggagggttctgtaacctgggaccccagtctagcgggctgaggagccggaccccagcttccctgagaacgggttgaggcttccggctggcggcgtccggcctccctggaccccggggccctgttctgttcatcgtaagagctaacaatgatacggttcttccttgatgccaggcaacatcccaaacaactttaattaatttatttaactctcccaccagccctatgagatagggcctgcgattatccccttttgtcagtaaacaggctcagagataccaagcgacctagctgaacctacacagcgaccaggatttggcccaggagtttgtcctccagggctcttcatggctaattcacaggcgtggcctctcgcggcttgcctgggccgcagcctggctcccgggtgtccagtccatcctcccttttggacgttggaggggccgcagcgtcatctccgatgcaccctcatcctcagataccgggtagagatctcgccggtaacgatccttcctactgcgtctgtgccccagcagctggtgttttacaccccacttccccaccgaaagactgttttagtgctccagacccccaccaccaccttgcgtcgcttgaatttgacactgctctgcaagtctctgtatagccccacgactcctaggattccctggaatatagatacttttctctcaggctcccgacgaacactgtcacttcttcagagacattatattaaaggtgtttaaccctgggtccgcagagttggtagaattcaaggaatgctagtacttgaattggggtggggggtggaattgcatctgtgtttttactaaccttttgaggcagcaacctcggtagtactagcagcagcggtgattttgttagcaatgaaaatcatagacattccttttttttgtttttctccttttttgagacagggtcactgtgtcacccaggctggcgtgcagtggagaaatcttggctcactgcaacctctgcttccctgtgcaagcgatcctgcctcagtagctgggaccacaggcacgcgccaccacacctggctaattttaatttttttttttttttttgagacaagatcttgctgtatcgcccaggctggagtacaatggcacaatctcggctcactgcaacctccgcctcttgggttcaagtgattctcctgccccagcctccctggtagctgggattacaggtgcacgccaccatgcccagctaattttttgtatttttagtagagatggggtttcaccatattg[134 bp omitted]ccatgttgcccaggctggtcttgaactcctgggctcaagcgatcctcccacctcagcattccaaagtgctgggattacaggtgtgaaccattgtgctccacccaaaatcacaggtattcttataccacattataacagcaaatgtcacaaaatactatattcattcatgattacttcaaaattgtatttttttttttttttgagacagtgtttttgctctgttgcccaggttggagtgcactggcacaatctcggctcactacaacctccgcctcctgggtttaagcgattcttttgcctcaacatccagagtagctgggattataggcacctgccaccacacccagctgatttttatatttttagtagagccagggtttcaccatgttggccaggctggtcttgaactcctgacctcaggtgatccacccccctggcctcccaaagtgctaggattacaggcgtgagccaccgcacccggcgaaaattgtattccttaatgaatcctcagctggatataactgcttttctttgtgatgctgtgcaggtttttttcacttcatgtactcatggagcctatgcaatttttaaatacatttaaacatattcaggccgggtttggtgtctccgttctgtaatctcaacattttgggaggccaagccgggcagatcatttgaggtcagaagttggagagcagtctgaccaacatggtaaaaccttgtctaaaatacaaaaaaattagcagggcatggtggcaggcgcctgtaatctcagctgttcgggaggctgaggcaacagaattgcttgaatcttggaggcggagtttgcagtgagcctaggtcgtaccagtgagcctgggtgacagagcaagactctgtcttaaaaaaagaaaaaaaaaaacattcagcgagaggtttctgggattcatcagactgctgaggagtttgtggcaccaaaaagattaagaatctttgcagtgtagattatgccaacaacggaggcagcccaccagttatttttatgccgtttaaccgtaggaagtcacttagacaccctgttccttcctcgtctgggcaatggtgatagtaatagttcctaccttttagagtggctataggagtaaagtgtgtagaacagcgcctggcatgtagtaagcactcagtgagtgttagctcatgttatttggggaccaggcttgattttgctgaggagttgtaccccaaccctgccgcgacctcgacactcagatgtgtggattcgccctgcccctcatctctgtgtatgttgagaggcaggaacttgttcacacccagcccattgttccgtgcctgccctcttccattgatcctgggtagtctggcttgctcagggcccctggggcccctgctgacacccactcctttcgcctccaggattcagcaccatggcggaagacatggagaccaaaatcaagaactacaagaccgccccttttgacagccgcttccccaaccagaaccagactagaaactgctggcagaactacctgggtaagcaggacctttccctggccacatacctcgagtcactcaccgcttgcctcttcctaggggacccatccaccccagcctcctcccttttattctgaacatccttactctggaaggcccatgcctctcatcacctgctgttcaggtccaggctagggttacaaactttagttcctgcaatgattttttttttaatttaaattttttattattattatggtttggttttgtttttttccagagatggggtctcactttgtcacctaggctggagtgcagtggtgcaatcatagctcactgcagcctcaacctcctgggctcaagaggtccccctacctcagcctctcgagtagctgggaccacaggcccacactactgtacttggctaatttttttgtagagaagaggtctcagtttgttgcccaggctggtctcaaactcttggcttcatgcgctcttcctgcctcagcttctcaaagtgttgggattataggtgtgagccaccgtgcctggcccctacaatgatttttttttaagctgtatgtgtgtgcgtactgtaacatgtacagaaagcacataacaaacatgtacagctaaatgaataattctaaagtgaaccccttgtgcaaccataacctggagagaaaagcagacattgcccacactctcatctccctgccttcttttttttttttttgagatggagttttgctcttgttgcccaggctggagtgcaatggtgcaatcttggctcactgcaacctccgcctcccaggttcaagcaattctcctgcctcagtcccccaagtagctgggattacaggcacctgccaccacacccagctaattttttgtatttttagtagagacggggtttctccatgttggtcaggctggtctcaaactcctgacctcaggtgatccacccgcctcggcctcccaaaatgctgggattacaggcatgagccaccgcgcctggcctccccaccttctttatgtcctgtctggaacacagcaccccgctctccccagtagagaagtgacgccactaactgggggttatcacatctttgtttttggttttggtttttgtttttgagactgagttttttgttttcgttgcccaggctggagtgcaatgtcacgatctcggctcactgcaacctcttctgcctgctgggttcaagcaattctcctgtctcagcctcactagtagctgggattacaggcacccgccaccatgcccagctaattttttgtatttttttttttttttagtaaagacaaggtttcaccatgttgatcaggctgatcttgaactcctgacctcaggtgatccacccacctcagcctcccaaagtgctggaattacaggcgtgagccactgtgcccggcctcacatctttgttttttaccaccatgtttattattttattttattttatatatgttatgttgttatgttattgatggagtctgtttcttgttgcccaagttggagtgcaatggcacgatctcagctcattgcaacctctgcctcccgggttcaagtgattctcctgcctcagcctcctgagtagctgggaatacaggcgctcgccaccacacccagctaatttttttttttttttttttttgagacggagtctcgctttgtcgcccaggttggagtgcagtggtgcaatctcgactcactgcaacctccgcctcccagcttcaagcacttctctgcctcagcctgccgagtagctgggattacagtcgcctgccaccatgcctggctaattttttttttttgtatttttagtagagacagggttttaccatcttggccaggctggtcttaaactcctgacctcgtgatccacccccctcagcctcccaaagtgctgagattacaggtgtaagccaccatgcctggccaattttatttatttatttgagacagagtctcgctctgttgcccaggctggagtgcagtggtacaaccttggctcactgcaacctccgcctcccgggtttaagcaattctcctgcctcagcttcctgagtagctgggactacaggcgcgtgccaccatgcccggctaattttttgtgtttttagtagagacaggatttcaccatgttggccaggctggtctcgatctcctgacctcatgatctgcctgcctcggcctcccaaagtgctgagattacaggcgtgagccaccgtgcctggccaattttttgtattttttttttttttttgagatggagtctcgctctgtcgcccaggctggagtgcagtggcgtgatctcggctccctgcaagctccgcctcctgggttcacaccattctcctgcctcagcctcccgagtagctgggactacaggtgcccgccaccgcgcccagctaattttttgtatttttagtagagatggggtttcaccgtggtctctatctcctgacctcgtgatctgcctgcctcggcctcccaaagtgctgggattacaggcatgagccactaggtccagccacttttttgtatttttaatagagacagggcttcaccatgttgtccaggctggtctcgaactcctaccctcaagtgatccacctgccttagcttcccaaagtgctgggattacaggcctgagccaccatgcccggctaccaccgtgtttagattcacctctttgtgaactttatacatactgtgtgtattcttttgtgtttggattttttcattcagtaccttctcagatccatacatgctgtggcatatagcttgctcattttcattgctgtccagttttctacaatttattctatgcctgtacacttgtgtgatttccattttggagttcttacaaatggtgtggctgtaaacatctttataaatgtaattttgctgggtgcagtggctcacgcctgtaatcctagcactttgggaggccgaggtgggcagatcaagaccagcctggccaacatggcgaaaccctgtctctactaaaaatacaaaaattagctgggcatggtggcaggtgcctgtaatcccagctacttgagaggctgaggcaggagaatcacttgaacccaggaggaggtagaggttgcagtgagctgagatcgcaccactgcactccagcctgagtgacagattgagaccctacctcaaaaaaaaaaaaaaatgtgttccaactcttgatctgggctgacttgaacccctttcttcacagacttccaccgctgtcagaaggcaatgaccgctaaaggaggcgatatctctgtgtgcgaatggtaccagcgtgtgtaccagtccctctgccccacatcctgggtatgtgcctcctgccagggcccttgggatgctggggtggggtcttagcagaggggagtgtggtggcttggtgggagctcatctgtgaggggcagagggaggacagggcaccacactgtcccaggactcagtgcctttcctcccgcctagaattacctccctgtctccttctgctgatgcctctcaaccagtcagggctctcagctgaggcgaccagggtgctttgctagatgtagctcactcatgcactctccaaatacacactcagcactgggctcccatccctgtgtagctcacaattctgtgcagtcctgtccttttttattaggaacatttttttttctttttttttttctttttttttttttagacaagggtcttgctgtgttgccaggctggaaaggctggagtgcagtggcgcgatcttgcctcactgcaacctccgcctcctgggttcaagcgattcccctgcctcagccttccaagtagctgggactacaggtgtgcaccaccatgcccagctagttttttgtattttaatagaaacggggtttcaccatgttagccaggatagtctcaatctcctgacttcatggtccacctgcctcggcctcccagagtgctgggattacaggcgtgaaccaccgtgcccggccctattatgaacattttcaaagcagagataataattcattgacctcaaatacatccatcacccaaagtgaatagttatcaggatttatccacggtttcttcatctaccccttttcgttttcttctttcctttgctgaagtattctaaagcaagtcccagacacgtcatttcacccctgcctacttcagtgtggacttctaaataatgacacagtaagacagtcctttcagccctgatctgaccaaatctgtcgtcaatatttaatagctctttgctatgcccctgccctttgtttaaaaaaaaaaaaaagtttttaaagacaaggtctcatgatgttgcccaggctagactcgaactcctgggctcaagtgttcctcctgtctcagcctcctgagtagcttggactacaggcatgtgccactgtgcctgtctctctctctctctctctctctctctctctctttgtcgccctctcgctctctcttgctctctttctctctcgctctctctttctcactctttctctctttctttcctttctttcttttctttcttgagccttgctctgttgcccagactggagtgcagtagcatgatctcagctcactgcagcctcagcctcctgaatagctgggactacaggcatgagccaccacacctggcccaatttttgtattttttttgtagaaatggggtttcgccttgttgcccagactggtctcgaactcctgagctcaaagcagtctgcctgcctcagcctcccaaagcgctgggattataggcatgagctaccgcacccagctgaatctttcaaaataaaaaaaattaccctttaacttggcaattccacatctagggatgctacaaaaatcttcatgtacaaagatgcccattgcagagttgttcgtaatggagaatatttggaaataacccaagttaaaacattgatcttgatagtctttatggagactatggtgatctacatgctagcacacagaaagaatgctaagacacaggaaaagtaagttgcagaacaatctatatagtaggagtcaatttgcaaggatggagtttttatggtgtggtatgtgtatgtaaataaagtaggcacataccgctggcacttattatgggccagctatgttgttagacctttttttttttttttttttgagatggagtcttgctctgtctcccaggctggagtgcagtggtgcaatctcagctcactgcaacctccgccttccaggttcaggcgattcccctgcctcagcctcccgagtgtctgggattacaggcgcctgccaccatgcccagctgatttttgtatttttagtagagacagagtttcaccatgttggccaggctggtctcaaactcctgacctcaggtgatgcacctgcttcggcctcccaaagttctgggattaccggcgtgagccaccacgcccagccatgttagcactttacatcacataaggtcaacatgctaacacaaccgtatgaggtaggtactattgttagtatcctcattttacaaaattggaaactgaggcccagaaaggttgagtaacttgcccaaagtcacacagctaggaagtgatggagcagggattcagattcagcctctctgttatccatgctttcatccactgttcgttcttgcaccagtggtcctcaccctttttggcaccagggatgagcttcatggaagacagtttttccacagacagggttggggatggtgtaaggatgagtccagcatattacatttattgtccactttatttctgttattattacattatataataaaataattatacaactcaccatactatagaatcagtgggagccctgagcttgttttcctgcaactagatggtcccatctgggggtgatgggagatagtgacagatcatcaggcattagattctcataaggatcatgcagcctagatccctcacatgcgcagttcacaatagggttcgcactcctaagagaatctaatgctgccgctgatctgacaggaggtggaactcaggcagtaatgcgagcattagggagtgcttgtaaatatagttgaagcttgtctcgctcacctgccactcacttccagctgtggggcccagttcctaacaggccacagaccagtacctggtaggcactggttggggctcggggacccctgccttatagcataaaatgtgagcgtgtatgtatataaaaacgtttatgcttgtaactgcttgtgaggtccacaaagagtagagtgttactttcagggagtgttaacttgacataggccttatatgggccttttcattttttttttttttttttttttagagacagtcttgctctgtcaggctggagtgcggtgtgcagtggtagcatcatagctcactgcagcctcgaactcctgggttcaagcagttctcccacctcagcctccctagtagctgtgactacaggtgcatgccaccatgcctggctaagttttgtattttttgtagagacagggttttgccacattcaccaggctggtctcaaactcctgggctcaagcgatcctcccacctttgcctcccaaagtgctggaattataggcgtgagccaccatgcccggcttattttttattttttgtagagatgggggtcttgccgtgttgtccaggttggtctcaaactcctgagctcaagcagtcctcccacatcggccccgcaaagtgctgggatgacaggtgcgagtcaccacacccagcctccatcattgtttatactgagcatcgcctgtggtcagtggtgggattgcactgtgtattgtttggcaccttttttgcacttgactatgtatcttgaagatccatccattcatgccagaacataaatcagcctcgttttttttcacagctgcctgctattccatctcccctgtttggacaaacagcatagtgttgacttgaggttttcaaagcagggcccacccttggagctctgtacagtgacacatctccccatcgacagctctgcagtgggcctggggttttcctgcccattactctcctcccagcatgtcagcttgttcagaacagtgatttctgtcttttggggtcactgctgattccccggcctctagaatagaggttggcacacagcaggtacctgtggatattggttgaacaaacaggtgggcaaagtgaggaagataagaagtccatccgttcagtttccccactgcggagggaataacactgtctttccacaggtcacagactgggatgagcaacgggctgaaggcacgtttcccgggaagatctgaactggctgcatctccctttcctctgtcctccatccttctcccaggatggtgaagggggacctggtacccagtgatccccaccccaggatcctaaatcatgacttacctgctaataaaaactcattggaaaagtgagactatgcgtgtgaacgggccaggcagtggcaagaagctgggctggaatcagtgccctgaccagggaggggcttgaatgagtattttctctgttttgtttttatttatttaatttaatttaattttttttttttttatgatggagtctcgttcttcacgcaggctggagtgcaatggcacgatctctgctcactgcaacctccacctccagtgttcaagcgattctcctgcctcagcctcccgactagctgggactacaggcacaccccaccacacctggctaatttttgtatttttagtagagatggggttttaccatgtcggccaggctggtctcaaactcctgacctcagatgatccacctgcctcggcctcccaaagtgctgggattacaggcatgagccaccatgcctagcgttttttaacttaattttattgaaccttggccaccctctctgtgccagtcaatgagtcaaatagttgattatacagaataacctaagttcctatgtgtgcaaccaccctacataattttaaagcaaattatatagattataatataatataaaatacataaagattatattttatccagaaataagaaactatatgtatctcttggagatacaatttttttttttttttttttgagacagagtctcaatctgttgcccaggctggagtgcagtggtgtcatctcagctctctgcaacctctgccttctgggttcaaactattctcctgcctggagatacctatttttttaacataattatttacacctaagaaattagttcttaatggccgggcacagtggctcatgcctgtaatcccagcactctgggaggctgaggtgggcagatcacctgaggtcaggagttcaagatcagcctgggcaacatggcgaaacctcgtccctactaaaagtacagaattagccaggcatggtagcacatgcctgtaatcccagctactcgggagtctgaggcaggagaatcgcgtgaacctgggaggcagaggatgtggtgagccgagatcatgccattgcactccagcctgggcaacaagagtaaatctccatctcaccaaaaaaaaaaaaaaaaaaaaaaaagagttcttaatatctaataagcaatctcctgcacaatgtgtaacttctccccgtgttgggacctgctctttcatgctgatcatgatggtagttggaagtcatttaagtaggccaagttgagagctgttcttcatggtgcccccaaaagaattgccacacaataacagcccagaatatccccaacagactcgtcaacagggacctagctagcatgaccagccggaacactcttatggctgaattggtgtgtcctcaaaacctttcaaatggccggggtgtggtggctcacacctgtaaccctagcactttgggaggcccaggcgagtgggtcacgaggtcagggattcaagaccagcctggccaagctggtaaaaccccatctcttctaaaaatacaaaaaaaactataaaaatacaaaaattagccaggtgtggtggtgcgtgcccctaatcccagctactggggaggctgaggcaggagaatcacttgaacctgggaggtggaggttgcagtgagctgagatcacaccactgtactccagcctgggcgacagagcgagactccatccccaaaaaacaaaaacaaaacttcaaatggttacaaacttgtctgatgcattcacatgagcagggatgattcttgtatggagaaaaatggccccagagatagatcttgtgaaatagctgctcatgaagaaaagtggctgtaggggccgggcgcggtggctcacgcctgtaatgccagcactttgggagaccgaggcaggcagataacctgaggtcgggagttccagaccagcctgaccaacatggagaaaccccgtctctactaaaaatacaaaatgagccaggcgtggtggtgcatgcctgtaatcccagctactctggatgctgaggcaggagaattgcttgaacccaggaggtggaggttgctgtgacccgagattgtgccattgtactccagcctaggcaacaagagcgaaactccgtctcaaaaaaaaaaaaagtggctgtaaacaggaccttagtgcacacacagggagcttgagggatcgtgggaggttatggcgtgggttggaagtagcaaagaacttaaacaccatgaaaaaaaaattttttttttgaaatggagtcttgctctgttgtccagactggagtgcagtgatgtgatctctgctcactgcaacctccacctcccggttcaagcaattctgcctcagccttccaaaacgctgggattacaggcgcttgccaccacacccagctaattttttgtatttttagtagcgatttagagagtagtttcaccgtgttgaccaggctggtcttgaactccgtgacctcaggttaaccatccacctcggcctcccaaagtgctgggattacaggcatgagccaccacacccagccaacaccatgaaaatttcaaatgaaacaggacggccagtgaaaagtcaaggtgctggactccttgagtccagctgcctgattctgcccagggtttgccaccagtgccagtgtttcctgtacattcctttagagatagctcatgcatctagaagtatttgtaaatatattgatctgattggatatggtgcccttttgctcacacagcccctgccacactggcctcttcagtgcacaggaactgtgagcaaatgtatttcgacacaccaggctggctccaaccccggatcctttacacttgctgtttgctcgacctggaatgtttggccaccagctgtccacaagctcacccctcactgccttcaggtcttcatttagcgaggccttctctgaccactcagccttcaccttcagctcctccatctttgtgccccttcactccttttgtttctttctcttttttcaatttttatttatttttttagtttttggagatggagtctctctgtcaccaggctggagtgcagtggcgcaatctcagctcactgcaacctcagactccctggttcaagcgattcttctgcctcagcctcccaagtagctgggattacaggcacgcgccaccacgcccagctaatttttgtatttttagtagagacggggtttcaccatgttggccaggatggtctccatctcctgactttgtgatccacccagctcggcttcccaaagtgctgggattacaggtgtgagccaccacacctggccttgtttcttaagcacttaccgctaacatgccaaatgttatccttcatcattgcaccactggaatgtaatttccatgcgggcagatttggaaatatatatttaattccccttttcagctttttttttttttttgagataaggtcttactctgtcacctaggctggcatgtagtggcgtaatctcagtttactgcagcctccgccgcccagactcaagccatcctcctacctcagcctcccaagtagctaggaccacaggcatagaccaccatactcagctagttttttgtttgtttgtttgtttttgatagagacggggtttcaccatgttgcccaggctggtctcaactcctgagctcaggtgatctgcccgccttagcctcccaaagtgctgggattacaggcctgagccaccgcacgccagcctgcattttttccaaatgttctaatctttctcattttattatttttttttttttaattttttttttgacacaagacctcactctgtcacccagcctggagtgcagtggcctgatcacagcttactgcagccttgaactcccaggctcaagagatcctcccaccccagcctctcaagtagatgggactacaggcatatgccaccacacccagctaatttttgtattcttttgtagagatggagtttgcccatattgcccaggctgatctccaactcctgggctcaagtgatcctcccgcttcagcctcccaaggtgctgggattacaggcatgagccaccacacccagcccagctgttaatcttattgatgattaattatacgtgatgggtcacttgtcagttgctgctttcaaggttctctttttatcgttcaataatttgattatgatatgtctggtgatggatatctttgagtttatcctatttgaagattattgagcttcttggctctagattgatggtttttttcatcaaattttgggagttttcagccattctttcttcatatattcttttttacccctttctttttgtcctctccttctgggattcccattatttgatgatgtctcacaggtctctgaagttctgttcacttatcttcgtgcttttttctttctgttccttagacttgatcatctcaactgatctatactcacgttcaccgatcttttcttctgcctactcaaatctgttgttgaaccctctattcctctattgaattttttctttttttttttttttgagacggagtctcgctctgtcgcccaagctggagtgcagtggcgcgatctcggctcaccgcaacctccacttcccgagttcaagtgattatcctgcctcagcctcctgagtagctggtactacaggcccataccaccatgcctgattaattttgtgtatttttagtagagacagggtttcaccatgttagccaggatggcctcgatctcctgacctcgtgatctgtccacctcggcctcccaaagtgctgggattacaggcatgagccaccacgcctggcccatttgaattttttcattttagttactgtacttttcaagtcccaagtttctgtttagttcttttaaaataatttctgcttttaggccaggcatggtggctcacacctgtaatcccagcactttgggaggccaaagtgggaggttcacttgaggtcaggagttcaagactagcctggccaacactccatctcaaaaaaaaagacagtattctttagcattagttccgctaatgattggacaaagatttccttagcctccaaaaaccaataatctcctagcctttgctgaggcatggtgggccatgctttcgacattcagccaggcaattgacaactctgccttcgccactacttctcccaggaaggcacacatcctcaaggtcagcccaatgtaagaagactgggttctcatctctggtctttcttgagcctgcatatactcctgggcatgcacacaaccctatgcatgcatgtgaccttctagatttccaagaatattttggagtttttcaaagccttctcattccccagctttatcttttaaactgtttcattagcctattattggcctcaactgttattcattgcttaggcagctgcctagttaaacaattgcatgcaattgtgtttcacaaatgcccctggggaaataattttgacgatgtatgagctctaagttaggtcaaatacagacaacattgcaagtaggggcttccagggaaccataagacgaatcaaataattctgactttctgggagtgaggcttttatggagtttcatcctcttctgccccgtttggtgtatgccaggctgctagtttccactgagaatgctggcagttaatattcaaggctaccatggagctggaatgggggaatggaactaggccaattaaaaatgtcacaaagtataaaaattagccgggcgtggtggcgggcgcctgtaatcctagctactcgggaggctgaggcaggagaattgcttgaacctgggaggcagaggttgcagtgaactgagatcgtgccactgcattccagcctgggcgacagtgagactctgtctcaagaaaacaaaaataaaaataaattttaaaaaagtcataaagttcactgctcttactaagattcagctgcttttcttgaataaacactttacagatttttgttgttgttgtggagacagagtctcactctgtcacccaggctggagagcaatggcacgacctcagctcactgcaacctctgccttcgaggttcaagcgattagctcctgcctcagcctcctgagtagctgggattacaggcacttgccaccacgactggctaattttgtatttttagtagagat[137 bp omitted]caaattaaccattttaatcggaaaacatctcatgtatcttattaccaaaccagtgccttgacgatgggattttcagtgtcatttgccaaattcgcaggcaccgcagtggggagccactgctcccacagcagaggcaatacacggcctagccttggggttgagaagttctggggacggtgtcgggggccctgggccaccatttttgcatggagccagccctgcgctgcgagggcgtggcatcggagagaccgtggcctcgtgggcagcatcggcggcccctggggacacgcgctggctcagtccccacctccgccagggaagcggtctgatgatacccatttcgcagatgggcaaatccacaagccaagtcgtgccgcccagaagaggcagaaccgggatttgaacctaggtttctcattctgcacctgaagaaataaatgtctggtccatgcgtgtgttggggggcgacggggacttttcttcaaccaagcccggtgtgccccctctcattttctagcacgttcttctcccccatctttgcacttatctcagactcccctcacacacctatcctgggtgccatcctttccctcagcccaccgcccatgtagtcagcctcctaagcgccccttccacctgtcccctcatctccccactgctctgcctcggtccagccctggccttggcaggggtccctgcctgggcctccccacgggctcccggcctcacagaggagcagccacctgtgcaaggtcacacagcaggagagacacttctgggattcaggacccacctgtgggtccgaagtggattttttgtttgtttggttttggagacagggcctggctctgtcactcaagctggagtgcaatggcacgatcttggctcactgcaacctctgtccccaggttcagccatcctcccacctcagcctcccaagtagctgggaccacaggcatgagcctggctaattatttttgtattttttatagaaacggggtttcactatgtcacccagtctggtctcaaactactgagctcaagcgatccgcctacctcagtttcccaaagtgctgggattacaggcctgagctaccacgccccgccctgatttggatcttgctcctattcccaggaaggcccatgtcctagcaagagagacaccaggtggtgcgcacgcccctccacctccaactcctccaccgccaacaaagcctgggacccagaggccatgggtcctacacaatctggtatttcaggtctataaatcatgggggtggcagggagcccatcaaagctgttcatccagcctggtctgccggctcagcctcttgtccaccccactgccgtgccccaaaacacacacacacacacacacaccctccctccttcctgggagactagcccaaggaggggcctgggcgtatatagggagccacggtgggtggggctggccagagaggctgcagacagagaaggtgaggagggggccctgggagtctgggtatggcatgaggggtctgaggctcagggaggggcagtgccaagttcaggccagtgactgccccaccggagcccgggtgtcctcttgtgcaaaatgcctccccaccagggctgtgggtacatcagtaccagcctgggccccgcagagagctggagcaacccctcgaagccagggtgtggctcagagatggggggtccggctggccctttacgctcctggcctcatccctgctcatgtgtcccaggatgatggcgtctgcggcagcagcggaggccgagaagggatctccagttgtggtgggcctgctagttgtgggcaatatcattattctggtgagactcgccccagtgctgggagccgagtggttgtgtggtggggaggggacagtcctgagctcggggtgggggatgagggtccagaactgtctctcgggcagactcagtggtcagcacagcctgggttgaaatcccagctctgcctctccccagctctgtgaccttagcaagcgactgtccctctctgtgccttctttcctcatctatagactgtgtcctcattgtgtgggctgttgtcatgtggattaatccatgtgtggccctcagctcagagaaagtgcccgaccaatgctggctatcaccatcagcatcactatggatataaagtgacagcctggtgcacaggaggccacaagaaggaaaaacaacagtgtctttcaattaacattgggttttggttttgtgttttttgttttgttttgttttgttttgttttgttttgttttgtttttgagacggagtctcactctgttgcccaggctggagtgcagtggctgatctcagctaactgcaacctctaactcccgggctcaagtgattctcctgcctcagcctccagaatagctgggattacaggcgcacaccaccacgcccggctaattttttttttttcagacagattctccctttgtcacccaggctgaagtgcagtggcgagatctcggctcactgcatcctccacctcctgggctccagcaattctcctgcctcagcttcccgagcagctgggattacaggcacatgctaccacacccggctactttttgtatttttagaagagatggggtttcaccatgttggccaggctggtcttgaactcctgacctgaggtgatctgcccacctcagcctcccaaagtgttgggattacaggtgtaagccaccgcgactggccgtgtgtttgttttagagacagggtctcactctgttgaccaggctgcagtgcagtggtgtgatgcttgctcactgcagcctccaactcctgggctcaactgatcctcctgcctcagcctcccaagtagctgggactacaggtgcacatcaccacatctagctaatttttttattttttgtagagacggggtctcactattgcccaggctagtctcaaactcctgggctcaagcaatcctcccgcctcggcctcccacaatgctgggactgcaggtgtgagccaccttgcctggcccatttgtaatgtttatggccatggccatgttcccctcctcggggaataacagcactgtcaagggagggcagatggaccaagcatctcctctgtgccagtccactgctccagcctttccacgtggcatccccttttatccccgaagaaactggcagctggggcgtgggggtcggttgtctggctgggctgtctcttctctcctggcctctgctcaccctcatcgctgctcatggaaggcgaggtctttgcccactttactgagagggcagtggaggctccaaatggggagggaacttgctcgtggagatgcctggtgccagggctgctggccccgagcagaccttcctaacccaccgctctgtccagctgtcaggcctgtccctgtttgctgagaccatatgggtgacagccgaccagtaccgtgtatacccactgatgggagtctcaggcaaggatgacgtcttcgctggtgcctggattgccatcttctgcggcttctccttcttcatggtagccagttttggtgtgggtgccgcactctgccgccgccggtccatggtcctcacggtgagactccaggggttgggggatggggacactgaaaacggagttcagcatcactgagtcatagtagcaggtgcagccccagccactagtgtgagttccccatggtgtcacactcagggatcccaggcatcatctcattcagtcttcccacagcccaataacccaggcttgagtagcagagctgggattttttcttttttttttttttggtaaagatgggggtctca[131 bp omitted]tagctgctttccagagtccatgctcatgaactctgccaataatagcacagctaccatttaataatggtttactacaagccacgagctgttctaaatggtttactggattagttcatttattcctcatagtccaccaagagatactgtcatcatcatgaccctgtttgatgaagattgaaactgaggctcagagaagtgaagtcacttatccagggtcacacattgagacaatggcagagccagtttcaacctgagcagatcggctcttgaggctgtgctcttaatctctgcccacaagaataacccatacttcccaagtgtctctcatgcacctgacactagggtaagcagtttagaaaatgagcttcgtggccaggcgcagtggctcatgcctgtaatcccagcacgtggggaggctgaggcggacagatcatttgaggtcgggagtccaagaccagactggccaacatggcgaaatcccatctctaaaaaaaaaaaaaaaaaaaaaattagccacgcatggtggcaggcacctgtaatccccgctactcaggaggctggggcggaagaatcactagaacccgggaggcagaggttgcagtgagccaagatcacaccactgcattccagcctggatgacaaagcgagactccatctcaaaaaaaaggaaagaaaatgagcttcctcaatcttgccagaagcccttcacagctagtgcttttcaacccatttaccagatgaggaaactgaggctcaaagaggctaacagcctctcccaggtgaccaggagagcagggattccaattcacggccccaatgacacagagacagcactgtgtttcctcgacagcagagggtttttcagattcccagaagcagccactcatttgatgaacaaatgcttatgagcaggagctacatgctgagccctacgctgggcactggggctctgtgctgagcgaaacataaaagcccttgacccagggaagtggtgctcagaggaggaagacagtgaacaggaggggaggtcaggagccgaggagggcgagggaagacctcactgccagggaaagcaaagacctagaggcactgggagcgaggcaggtgtgtaactggaggaagagccttccaggtggaggtggcagcaagggcaaaggctctgaggccagagcgggccaggagtccaaagcagctggagctgagtgaggaggaggttggggggtgagaggacatgaggcagacagatggggaggagaacagtgaggaatggggatgggaaagaagcaggagggaaggcaggtgttgtggactttggctttatcctgagtaagatggacccatagaccccctgctcccctcccctcccttcccctccccttccctcccctcccctctccttccttccttccttcgtttttctacacaggcaggtgttgtggactttggctttatcctgagtaagatggagccatggactcctcccctcccctcccctcccctcgcctcctctcccctcccctcccctcctttcccctcccctcccctcctctcccctccccacctccctccttccttccttcatttttctagacaggcaggtattgtggactttggctttatcctgggtacgatggagccatggacttccttcccttccttctttccctccctccctccctccctccctcccttccttccttccttcctttctttgtttctctagacagggtctcactctgttgcccagtttggagtgcagtggcacaatcatagctcattgccacctcgaactcttcatctcaaatgatcctcccacctcagcctcccaatgagctgggactacaagtgtgcatcaccatgtgcagctaatttttgtattttttgtagagatggagtctcactatggtgcccaggctggtctccaactcctggcctcaagtgagcctcccacctcagcctcccaaagtgttggaattacaggcatgagccaccacacctgccctcttattttcttatcctgtatttaattatctggcataacaatttaaccaaagccctaaaaagtcacccaactagttttaaaaattgtgtctgggccgggctcggtggctcacgcctgtaatcccagcagtttgggaggccgaggcaggtggatcacaaggtcaggagatcgagaccttcctggctaacacggtgaaatcccgtctttactaaaaaacaaaaaattaaccaggcgtggtggcgggcgcctgtagtcccagctactcgggaggctgaggcaggagaatggcgtgaacccgggaggcgcagcttgcagtgagcagagatcgcgccactgcactccagcctgggcgacagagcaagactctgtctcaaaaaaaaaaaaaaattgtgtctgtttccccattagtttgtcattaactaagacattttctccccaaatttctttttttttttttttttgagacggagtcttgctcagttgcccaggctggagtgcagtggtgcgatctcggctcactgcaagctccgcctcccgggttcacgccattctcctgcctcagcctcccgagtagctgggactacaggcacctgccaccacgcctggttaatttttttttttgtatttttagtagagatggggtttcgccgtgttagccaggatggtctcgatctcctgacctcgtgatccgcccacctcggcttcccaaagtgctgagattacaggcatgagccaccgtgcccggcccccaaatttcttacaggaaatttctaaagtagactagagtccgcagtatttgagccctgcatacctctcacctgatttcaacaacatcagctgcagactgcccgacattgtctcctctatcccccttctctcatactttttcttctgggtattttgaagcacattctagatgccaagtcacttgcctgtaaatactggagcacacatttctctgagtgataagcacattgttttaaagcagtcaggaggttgtgcaatgtcatccatctcccagcagcagagttcacacatccacacgcaacctcctgctgctttatagatgaaggtgccaggtgaggacatgaaaagaatttgcattaaacatcaactgacaagcttttttttttctcctgccctctgtgccgttggcacaacccaccaaattcaatcaagttcttctatatcttccaatacccagtctgtgtcaaatgtctctgattatctgagaacatcgttttatgttgtttgttttattttaagagacagggtctcactctgttgcccaggctggagtgtaatggcacaatctcggctcattgcaacctctgcctcctgggttcaagctattctcctatctcatcctcctgagtagctgggattacaggcacccatcaccatgcccagctaatttttgtatttttgcatttttagtagatggggtttcaccatattggtcaggctggtcttgaactcctgacctcaggtgatccacccgtctcaacctcccaaagtgttgggattacaggcgtaagccactgcacccacccttgtttgttttgttttaagagacagggttttgctctgttgcccaggcaggaatgcagtggtgcgatcatagctcgctgaggcctccaactactgggctcaaacgatcctccaacctcagcctcccaaatagctaggactaacactaccactagtagtaactatgcttaactaatttttttatttttattttttgtagcgacggggtctca[131 bp omitted]ggtttcaccatgttggccaggctggtctcgaactcctgactcaggtgatcgccccctcggcctcccaaagtgctgggattataggcgtgagccaccacgcctcgcctgtctcaaaaataaattaattaaattaaatatttcaaaatacagaaaagttggaagacaatacagcgaacacctgaacacccaccacatattatagatgctgctagtcacactgccccaaacttttttaaaacttgcatttccccagtgatgcttccctgacggggtgtggcttcacgggctctgcccgacgggccgtcctccctctgtctccccagtacctggtgctcatgctcatcgtctacatcttcgagtgcgcctcctgcatcacgtcctacacccaccgtgactacgtgagcccggcgaggcctggggaggggcctgacctgcatgggaggggcgagggtcccggcgcggcggggcggaggtcgtcctctctccccacccagccctgccggcccttgttcttccctgttctcctcagatggtgtccaacccatccctgatcaccaagcagatgctgaccttctacagcgcggacaccgaccagggccaggagctgacccgcctctgggaccgcgtcatgattgaggtgggcggggtggaccgggtgctgggagggccctgggctccgtccacagaggccgatagagctcccgatgtgccagcttttagaggagtgagtgccttaaagacatccgctcatgagatctctaggagagcagggctgcggtcatcaccgttctgcggatgagtaaacaggcccagaaagggaaagtcccttgcccgaggccacacagtcggtaagtggtgggagctgggattggaacccggcagcctagctcctgacctccctgctcttagcctacacatactacctcaacagaaatgttgataataacaatgatagtaacagcaccattcactgagctaggtttcacactgttcaaaggacttttatttttatattttgagatggggtcttgctctgttgcccaggctggagtgatcatagctcactgcaacctccaactcctgggctcaagtgatcctcccgcctcagcttcccgagtagctgggaatacaggtgcgccccaccacacccggctaagttttttaaattatcttttgtggagatgggggtcttgctctattgcccaggctggtctggaactcctgggctcaggattggagcgattctcccacctccgcctctcaaagtgccgagatcacaggcatgagccacgagtgcctggcctcaaagcacatttttttttttctttttatctttttttttttttttttttttttgagacagagtcttgctctgtcgcccaggctggaatgcagtggcgcgatctcggctcactgcaagctccgcctcccgggttcacgctattctcctgcctcagcctcccgaatagctgggactacaggcgcctgccaccgcgcccagctgattttttgtatttttagtagagatgggtgttagccaggatggtcttgatctcctgaccttgtgatccacctgcctcggcctcccaaagtgctgggattacaggcttgagccaccgtgcccagcctttcaaagcacttttaaagcttttttaatcctcacgaccactccataagggagatcggccttttagtgatgaggagaccaaagcaagaggttgaatatcttgcatgaggtcacacacctggtaggtcacagaactggaaggattcaaactcagacttccaggtttgaagagatacagtcttcctcaaatccaacatgatattgcactggaaaaggaagaaattggctgggtgcagtggctcaaacctataatcccaacactttgggaggcaaaggcgggcagatcacttgagttcaggggttcaagaccatcctggccaacatggtgaaaccctgtctctacaaaaaatacaaaaattagtcaggtgtagtagtgtgcgcctgtgattccagctacttgggaggctgaggcaggagaatcacttgaacccaggagggggaggttgcagtgagccaagatggcgccactgtactccagcctggacaacagagggagactccgtctcaaaaaaaaaaaaaaaaaagaagaagaaattgaggactcaaggaaaactgaggcgtcaatgtggcccaagtcctctagctagccaggatttgaacccatgtttgaagggtgcccaagcctatgttttcctcattcaggagccacaaattaaacacctggattccttaccaaggccaggaaaagccagaaatctgccctttttgtgttattttatcagcatagttgttgataaaaatattttattttattttattttttgagatggagtttcattcttgattcccaggctggagtgcagtggcacgatcttggctcactgcagtcgccacctcccggattcaagcaattctcctgccccagcctctcaagtagctgggattacaggcgcccaccaccacacccggcaaattttgtatttttagtagagacggggtttcatcatgttggtcaggctggtctcgaactcctgacctcaggtgatccatccacctcggcctcccagagagctgggattacaggcgtgagacaccgtgcccggcaaaaatattttaaaataagtcagaggtgcaggtttaatccaaatcccccatcagcctcctggtcctgggacaaatattgtctgcaccgtgctcacacacacagacacccaccggacacactcgcttggaggcccaggacatggggaagttgggcccagctgtgtcaaaggccaatcctgcccctccttgctgtgtgacctcaggcaagcaactgtcctctctgagcccgagcctgcctgaccccctgcttttcactctagcaagaatgctgtggcacatctggtcccatggactgggtgaacttcacgtcagccttccgggcggccactccggaggtggtgttcccctggcccccactgtgctgtcgccggacgggaaacttcatccccctcaacgaggagggctgccgcctggggcacatggactacctgttcaccaaggtgtggccgtctgccctgctccatctgtctatccatctgtctgtcttcctctggtctctgctccctctctgattctctctttctccctccctgtgtctgtccgtctagctttttccctctcctcttcccctctctgattttcttgttttctttttctttctttctttctttctttcttttttttttttcaagaccgagtcctgctctgtcacccaggctggagtacagtggcacaatctcagctcactgcagcgtctgcctcccgggttcaagggattctcccacctcagcttccagagcagctgggattacaggtgcgcaccaccctcttggctagtttttgtatttttagcagagacggggtttgaccatgttgtccaggctggtctcgaactcctgagctcaagtgatccacccacctcagcctcccaaagtgctcagattacaggcgtgagccaccacgctgggtcccctctctgattttctagtgctcccccaactctctctcaagtcagcaggatgcacccagggtctgtctgaaccagacctggcacctacaactttactcaggttgtccgagaataagagcaataatagggccgggcgcgatggctcatgcctgtaatctcagcactttgggaggctgaggagggcagatcacttgaggtcaagagttcgagaccagcctgaccaacatggcgaaaccccatctctactaaaaatgcaaaaattagcccagagcagtagcacgtgcctgtaatcccagctactcgggaggctgaggtaggagaatcacttgaactctggaggtgaaggttgcagtgagccgagattgtgccactgcaccccagcctgggcgacagagtgaaactccatctcaaacaaaaaaaaacaaaacaaaacatcaaacaaaacaatagagctaggcacgggggctcacgactgtaatcccagtactttgggaggccaaggcaggagcatcacttgaggtcagaagctcaagaccagcctgggcaacatatcaagaccccgtctctacaaaaaagtacagaaaattagccaggcgtggtggtgcgcgcctgtaatcccagctactggggaggctaaggcaggaggattgtttgagtctaggaggtcaaggctgcagagagctgtgatggtgccactgcactctagcctaggcaagagacttaaaaaaggcaagagactttaaaaaaaaaaaggccgggcgcgcacagtggctcatgcctgtaatcccagcactttgggagaccgagatgggaggatcacaagatcaggagttcgagaccagcctgaccaacatggtgaaaccccgtctctactaaaaatacaaaaattagccgggcgtagtggtgcacacctgtaatcccagctactcaggaggctgaggcaggagaattgcttgaacgcgggaggtaaaggtttcagtgagccgagatcatgccactgcactgtagcctgggtgacagagggagactgcgagactgtctccaaaaaaaaaaaaaagccagctgtaagatcaaaatcaccctcagattgtcatagccatcagcagggcggcacctacttgtgcagggcctgggttcaacatcagctccctggggccccgaaaccacccgaggaggtggacagtgccatggtccccattgcacaagtgagaaaaccaatgctcagggaaggtggtgactttcccaagggcgcacagtgactctcgctttcagcggctaccctcatgggcgtcttctcaaacttcccccatccccctgcccagggctgcttcgaacacatcggccacgccatcgacagctacacgtggggtatctcgtggtttgggtttgccatcctgatgtggacggtgagaggcggggagcccacaggctgggtgggctgggggtggggggcggagtgccctcatctcgctgcctcctcgccagctcccggtcatgctgatagccatgtatttctacaccatgctctgagggacaggaggggaaggcaacatacacaccccggactcctccgcatcctcctcctgcttcctccgctgggcctggatggctgcctcacctctcacctcccaacgtccctagcccttacgtccttccacttccaagatctttttccaggttcctgagccctactgtgtctcaggtgtgccctgaaaccccagggcttgtgtgcacatatccttagcccatctttcaagggacctctccatgatcccacctcccattcacagatacctctcttgtagctctctgacctcctccttcatggcaggcatcgccattcttgctgaaccgtttgtgattgccatttgagctctggaagcctctattgccatgagagttctgtcacggtcactttactgtccccatcatcacccagcacggggctaagcatatactagatagtcaataaataaataaataatgaatgaatgaatgagtttttt[136 bp omitted]aatggtgagacccccatctctacaaaaatgcaaaaatcagccgggtatggtggcgcacatctgtaatcccagccactccggaggctgaggcagaagaatcacttgaacccgggaggtggaggttgcagtgagctgagatcgcaccattgtactccagcctcggcaacaaatcgaggccctgtctccaaaaacaaaaaaaactattctgatggaagtggtggaaacccaactgtcactgactgaagtgtaaaatggaatttatcagctcacgtaactgagtcaacggggctggcttcaggcatgtctggatccagatgttcaatctaagtttccaggaaacctgcttcattccctgacaggatttctctggcaactccagacttaatgtctttataactaagcaatgcaacagaaggaaagagcctctctcccaagggctgtagccaaggtccagagttgtagccaaggtccagagttgaatctcactgtctcggcttaggttctaggcccttcgttaggttgggaaagggagggcacctggcttggtaatcctgctaaggatgcatgcagtggtggtgttggaaggggagttgtttatcaaaggaaaatccagatacagggctgctgaggcttataggtgataaaaatccttctcctagggatatagcttccagcaagttctctaaggggtccatgacagcaaaccattacgaattgaattatggctgggcactgtggctcacacctgtaatcccagcacttgctgaggtgggcagatcacttgaggccaggaacttgagaccagcctggccaaaatggcgaaaccctatctctattaaaaatacaaaaaagtacctgggcatggtggtgtgcacctgtagacccagctactcaggaggctgaagcacaagaatcgcttgaacccggaaggtggaggttgcagtgagccaagattgcaccactgcactccagcctgggagacagaacaagattccgtctctaaaaaaaaaaaaaagaaccaaattatcactctttgttctccctgaagccacgactaggccttcccaagagggcctgggggcttccttccccatcaaataatttcttggggttcccatttactccagtggtctgcagatagtctttgattgctgaattcagatttcattttttaaaaatatgtaatggataaagaggtcattatttattagagtgaaaaatcggaaactacccaacaaccatcaccaaagggatgggttgtgtaaatcatgttatgcccttggactgaaatgctctgtggctgttgtgtgtgcgcctgtggtcccagctactgggaaggcttaggcgggaggaccgcttgagccctggagttcgaggttgcagtaagctatgttcacacctatgagtagccactgcactccagcctgggcgacacagcaaaattccatctctaaataataataataataggctgagcacggtggctcatgtctgtaatcccagcactttgggatgtccaggtgggaggatcgcttgagccccagagtttaagatcagcctgggcaacatagc[131 bp omitted]ccctgtctctacaaaaaatgcaaaaattatccaggtgtggtgatgcgtgcctgtggtcccagacactggggaggctgagatggaaggatggcttgagcccaggaggcagaggttgcagtgagccgagatcgcaccactgcactccagcctgggtgatagagccagactctgtctcaaaaaaaaaaaaaattaaaaaaattatctgggtgtagtagtgtgtgcctgtggtcctagcttcttaggaggctgagatggaaggactgtctgagcacaggaggtcgaggctgcagtgctccacaccaccacactccagcctggggaacagagcaagaacctgcttcaaataaataaatatatatatatataattataataataaatactttttaaaagagatagctgtatgtgagttgactataaaaagatctcataataactggaaagcccatatgaggatgttcattagtaaaataaatgactatcagcagggcactgggtaaattagctacgctatatccatcctctgcaataccacaaagaggtaaaaataaaaagaacaagaactctgctttaacatggaaaacgcgctaagaaatacatagtaggaaaaattgaaaactatatacagtactttttttttttttgagatggagtttcactcttttgcccaggctagagtgaagtggtgcgatcttggctcactgcaacctctgccccctgtgttcaagcgattctcttgcctcaggctctgagtagctaagattataggcacctgccaccatgcccggctaatttttgtatttttactggagacaggcttcgccatgttggccaggctggtctggaactcccgacctcaggtgatccactcacctcagtctcccaaaatgctaggattacaggtgtgagccatcacacctggcccatatagtactcttattcctgcagggttgatcaaacggagctttagtctttttcttccttaaaaaaatgagttaatgtttttataataatgtttagaagaatagaggaaaaactttgttgttttgcagaacacttttttgttgttgttgttgttgacggagtctcgctctgttgaccaggctgaagttcagtggcacaatcccggctcactgcaacctccgcctcctgggctcaagcaatcctcccctctcagcctcctgagtagctgggactacaggcacgcaccatcacgccccgctaatttttttttttttttttttttttttttgagatggagtctcattctgtcgcccaggctggagtgcagtggcgcaatcttggctcactgcaagctccgcctcccaggttcacgtcattcttccgcctcagcctcccacgtagctgggactacaggtgcccgccaccacacccagataattttttgtatttttagtagagacggggtttcactgtgttagccaggatggtctcgatctcctgacctcatgatccgcccgtcttggcctcccaaagtactgggattataggcgtgagccaccgcgcccggcctgtattttttataaaaatacaaaaaccgttctgcgcctggtagaacacttctttattacagcaatatataaaacaaatataactttaagccgggtgtggtggctcacacctgtaatctcagcactttgggaggccaaaacaggtggatcacctgaggtcaggagtttaagaccagcctgggcaacatggtgaaaccccgtctctactaaaaatacaaaaaattagccaggcatggtggcgggtgcctgaaatcccagctactcaggagactgaggcacaagaatcgctggaacctgggaggggaggtcgcagtgagctgagatcataccactgtactccagcttgggtgacaaagtgagactccatctcaaaaacaaatatatatatatatatatatatataaatttatattatatataaacttaatataactttaaatattcataatgacactatacattatgattgatggtgttagtccactctctcaaatttgagagaatagcttgtagaattcttgaaattcaccaaccttcttcataaagacacaggattgaaatgcatgtgcatgtttttgttaagagcataccaatttcattctcctcagttttgctcataatctccgtattttcatgcaccctcagtgagttagccaaactcaaggccttttattacggaaagggctagcacagttgtggtgacacccttaaaagttaatatccttaaaagttaataactaataagtcaacaacagatttttgacctagctcccttttcctttagagcaaaaagaactttcacctgagcatccagcccaac[140 bp omitted]gtgaaaccccatctctactaaaaatacaaacattagctgggcgtggtggcgggcacctgtaatcccagctacttgggagactgaggcaggagaatcgcttgaacctgggaggaggtggcagtgagccgagattgagccattacactccagcctgggcaacaagagtgaaactccgtctcaaaaaaaaaaagaaaaaaaaaaaacagaactggcagcggggaagggctggaggcagtgtcatcagaggaagatttttggattccaagcacagatgatgatttgtctgtggtcagtttgttttgttcttttcctttctttcttttttttttttttttaagacagagtctcgctgtcacccaggctggagtgcagtggcgtgattttggctcactgcaacctccacctcccaggttcaagcgattctcctgcctcagcctcccaaatagctgggatttacaggtgccccccgacatgcctggcttttttttttttctctgagacagagtttcgctcttgttgcccaggctggagtgcaatggcgagatcttggctcaccacaacctctgtctcccaggttcaagtgattctcctgcctcagcctcccgagtagctgggattacaggcatgcaccaccatgcctggctaattttgtatttttagtatagacaggttttctccatgttggtcaggctggtcttgaactcctgacctcaggggatccacccgccttggcctcccaaagtgctgggattacaggcattagccaccgcacccagcccctggctaatttttgtatttttagtagagatgagttttcgccgtgttggccaggctggtctcaaattcctgacctcaagtgatccacccgcgtcggcctcccagagtgctgggattatgccttctgttgatgatgtcaatcactttttgcggttggtcgtctccttgatctgaataatctgaatccatatcttcgtattctgcccaaaatgcctccactggaagccataaactgggcccaagtccccttcttctcagtggagaatcccaagttgtccaaaaagggctccactgcctcatctcacattttcactctcttggaagacagttcttcagcatatgtggatcccttgataaacgacagcaactcctccaaaacattgtggttgtcagcagaggaaagtcacttctcaggctgcagtgggactgactgactgcctgcctgccgaaaacgaaaacagcggcggcagagagcaggtgccctgggggcgtccttcctgcagctgcagcagacgatgtgctccacctgccttaggtactgcagctccccgtggggcggacagggctcagcatcccgctcctgcgcggcaggacagaggcagtgaggagacagggttagagaccgggtttcaccatgttggccaggctggtctcgaactcctgaccttgtgatctgcccgccttggcctaccaaagtgctgagattacaggcatgagccaccacgcccagccccaaattcataaactttcttaaaacactatgagattttttgcaatttgttttagctcatccactatcgttagtgtattttatgtgtggctgaagacaattcttcttcttctaatgtggcccagggaagccaaaagattggacatcccctttgggaggccgaggcgggtggatcacgaggtcaggagttcgagaccaacctggctaacaaggtgaaatcctgtctctactaaaaatacaaaaaaattagccaaacgtgttggcgggcgcctgtagtcccagctactcgggaggctgaggcaggagaatggcatgaactagggaggcagagcttgcagtgagccaagatggcaccactgcactccagccttggtgacagagcgagactccatctcaaaaaaaaaaaaaaaaaaaaaaagattggacatccctgctttacaacttggtttcttcacctaatcatggattgtggttatctttccaactcagtgaatatgaattcattttacttttttatttttttgagatggagcttcgctcttgtcacccaggctggagtgcaatggcacaatcttggttcactgcaacctctgcctcgcaggttcaagcgattctcctccctcagcctcctgagtagctgggattacaggtgcacgccaccacgcccagctaatttttgtatttttagtagagacggagtttcaccatgttg[136 bp omitted]atattccagagtataaatgtgttacagatcatcatgatctgtttgttgttcagttaataaggcaaggagcaaaacattgtgctaaagtggtctcatttttataaaaattatatctacatatttcccattaagaactcctttgttttattttattttagttcagtttttttgagacaggatgtcctgtcacccaggctggggtgcagtgccacgatctcagctcactgcagccttgacctcccaggctcaggcagtcctcctacctcagcctcatgaggaactgggaccacaggcatctgccaccacgtccagctaaatttttttttattttttgtagacatgaggtctgtgttgcccaggctggtcttaaactcctgggctcaagcgatccttccacctcaggctcccaaagtgctgggattacaggcatgagccaccgcacctggccccatctattactttttcttttcttttcttttccttttctttccttttctcttcttttttttttttttttttttttgagacagggtctcactctgtggcccagactggagtgcagtggtgcgctctcggctcaccaccgcaacctccgtcccacaaggctcaagtgattctcctgcctcagcctcctgagtagctgggattacaggcgcataccactgcagcctggctaatttttgtatttgtagtagagacagggtttcaccatg[136 bp omitted]taaaatactgaacagtatatggctttacttttcaaactagaattcttatatttttaaatttaaatttttttaatttatttatttatttatttattattttgagatggagcctcgttctgttgcccaggccggagtgcaatggagcgatctcagctcactgcaaactccaccacccaggttcaagcgattctcccgcctcagcctcctgagtagctgggattacaggcgcccgccgtcatgcccgactaatttttgtatttttgtagaggcgaggtttcaccatgttggccagactggtcttaaactcctgaccacaggtggtctgccctccttggcctcccaaagtgctgagatttcaggtgtgagccactacagctggcctcaaaccagaatttttaaaacgccacttacatggaatatacacactggattttcccaaacaagagcccctccaggctgacttccctaaatggcttttcagcaggccccggaaagcttctcgccccaccctgggcacacattggaacagcttgtaaacatgtcaaggaaattggggattccatcctcatctgctcataaagtcaggtgtcctcagccaggcgcggtggctcaagcctgtaatctcagcactttgggaggctgaggtaggtggatcacttgaggtcaggagtttgagaccagcctggccaacatggtgaaaccccatttctactaaaaaatacaaaaattagccaggcgtggtggcgggcgcctgtaatcccagctacccaggaggctgaggcaggagaatcacttgaacctgggaggcagaggctgcagtgagccaagatcgcgccattgcactccagcctgggccacagaacgagactcttaatcaaaaaaaaaaagtcagatgtcctcaccagcaagtcgatggtgacttagttgatagtgattgggattctctgagagaagcagagacagcactgacttctcaaaaggcccaccacactgagcctcaatgtgcccctctataaaatgagagttgtaacagtccctatctcatagcatagggccctgttcttttttctttctttctttgtttttttgagacagtgtcacactctgttgcctaggctagactgcagtggtgcaatcacagcttactgcagcctcaacctcccagactcaagtgatcctcctgcgtcagcctcccaagtagctgaaaccataggcatgtggcaccacacctggctatttttttattatttgtagaagcaacagggtctcactatgttgccccagatggtcttaaactcctggcctcaaacggtctttctgcctcggcctcccaaagcactgggattgtaggcatgcaccaccacacccagcttcctattctaagagctcaggaaactgtggactttctaattatgaatcagggatattcttgatcctgtataatcagaaccaaatgcagaaataaacttcctgctgaggctgcaatcgtctctagtgaacctcaatgtcaagtgtttggggcactacccatcctcaacactcaccaaagggaccctcatatatgcatttataaaaataaagtccgggcgcggtggctcatgcctgtaatcccagcactttgggaggctaaggtgggcagatcacttgaggtcaggagatcgagaccagcctggccaacatggtgaaaccccatctctatcaaaaatataaaaaattaggccggtcacggtggctcacacctgtaatcccagcactttgggaggccgaggcgggcggatcacgaggtcaggagattgagaccatcttggctaacacagtgaaaccccgtctctactaaaaatacaaaaaaaaaaaattagctgggtgtggtggtgagtgcctgtacgtagtcccagctactcaggaggctgaggcgagagaatggcgtgaacccgggaggcggagcttgcagtgagcggagatcacgccaccgcactccagcctgggtgacagggcaagactccgtctcaaaaaaaaaaaaaaaaaaattagctaggtatggtggcgggcacctgtagtcccagctactcgggaggctaaggcaggagaattgcttgaacccaagaggtggaggttgcagtgatccaagatcgcaccactgcactccagcctgggcaacagatcaagactccatctcaaaaaaaaaaaaaaaagaaaaaaaaagtcacacttgaaaatgcttggtgcggccgggcatggtggctcatgcctgtaatcccagcactttgggaggccgaggcgggcggatcatgaggtcaggagttcgaaaccagcctaaccaacatggtgaaaccccgtctctactaaaaatacaaaaattagccaggcatggtggtgtgcgcctgtaatctcagctacttgggaggctgaggcaggagcatggcttgaacccgggaggcggaggttgtggtgagctgagattgtgccattgcactccagcctgggcaataagagcaaaactccatctcaaaaagaaaagaaaagaaaatgcttggtgcttttactgtgagatgatgagcccatgaactcagcatatgttagcgtgaatatgtttctggctgaggatctttaaagaatgtttgtggaggccgggtgcagtggctcatgcctctaatcccagcactttgggcagcccaggcgggtggatcacaaggtcaggagttcaaaaccagcctggccaatatggtgaaaccccgtccctactaaaaatacaaaaattagctggacgtggtagcatgtgcctgtagtcctagctgcacaggaggctgaggcaggagaatcccttgaatccaggaggtggaggttgcagtgagccaaaatcgtgccactgcactccaacctgggcaacagagcaagactacgtctcaaaaacaaaacaaaacaaaacaaaacaaaagaatgtttgtggagtttatgccaattgatatgcataaaatcagtttttttcctttattattattatttattttttgagatggagccttgcactgttgcccagactggagtgcagtagtgccatctcggctcactgcaacctccacctcccgggttcaagtgattctcctgccttagcctcccaagtagttgggattacaggcacccgccaccacgcccagctaagtttttgtatttttagtagagatggggtttcacta[140 bp omitted]gagtgcaatggcaggatcatggctcactgcagcctcaaccccccagactcaagcgatcctcctgcttcagcctgccaagtagctgggactacaggtgcataacactataactggctaatttttaaattttttgtagagacggaattttgctgtattgcccaggctgatctcaaactcctaaggctcaagtgattctcctacttcgacttctcaaagtgctgggattataggcatgagccat[136 bp omitted]catggtgaaaccccgtctatactaaaagtacaaaaaaattagccgggtgtagtggtgcacacctgtaatcccaactacccaggagctgaggcacgaaaatcccttgaacccgggaggcggaggttgcagtgagctgacatcattccactggactccagcctggccgacagagcgagactgtctcaaaaaaaaaaaaaaaaaaaaaaaccctgcaaaagaatttaatggcatgaaaaaaatgcttgggaaattgtgacatgagaaaaacagattacaatgtagcatgccaagtatgattccttccctgataaaaatataaatatgtgcatgtttgcattttttttaaaagaaagtcttccaaaggttattgaggaagaggacacatttgcaggggatctttacttcattccttggacattttggtattttgcaaatattttatgatgactattgcctttgtcctctaacaaaaaatcaagaaatatatcttagttaaaatgtccctgctggacataaaatgtacattgagaagagaattatcctactaaatattttcaaactttatctgagcagttaaggtgtccggaattggtgggttattggtctcactgacttcaagaatgaagccgcggaccctcgcggtgagtgttacagctcttaaggtggcgtgtttggagtttgttccttccgatgttcggatgtgtccggagtttcttccttctggtgggttcctggtctcgccggctcaggcaggagtgaagctgcagaccttcgcggtgagtgttactgctcatgaaggcagtatgcacccaaagagtgagcagcagcaggatttatagcaaagagcaaaagaacaaagctaccacagcacggaagggaaccccagcgggttgccgcggctgactcgggcaaccttcttttattctcttatctggccccacccacatcctgctgattggtccattttacagagagccgagtggtctgttttgacagggtgctgattggtgcgtttacaatccctgagctagacacaaaggttctccatgtccccactagattagctagatacagagtgtccacacaaaggttctccaagtccccaccagagtagctggatacagagtgtcgattggtgcattcacaaaccctgagctagacacaggatgctgattggtgtgtttacaaaccttgagctagatacagagtgccgattggtgtatttacaatccctgagctagacataaaggttctccacctccccaccagactcaggagcccagctggcttcacccagtggatcccgcactggggctgcaggtggagctgcctgccagtcccacgccgtgcgcccgcactcctcagcccttgggtggtcgatgggactaggtgccgtggagcaggggcggcgctcgtcggggaggctcaggccgcacaggagcccacggggtacggggagaggggaggctcaggcatggcggtctgcaggtcccaagccctgccccgcgggaaggcagctaaggcccggcgagaaattgagcacagcagctgctggcccaggtgctaagcccctcactgcccggggccggcggggccggccggccgctctgagcgcggggtccaccgggcccacgcccacccggaactcggcgctggcccgcaagcaccgcgcgcagccccggttcccgcctgcgcctctccctccacacctccccgcaagctgagggagccggctccggccttggccagcccagaaaggggcttccacagtgcagcagcgggctgaaggttcctcaagtgctgccaaagtgggagcccaggcaaaggaggcgccgagagcgagcgagggctgtgaggactgccagcacgctgtcacctctcagtaagacaggtcagggctgggcacagtggctcacgcctgtaatcccagcattttgggagctgaggcaggaggattgcttgaggccaggatttccagaccagcctggccaacatagtgagacctcatctctccaaaaaatttaaaaattagctggccatagtggtgcgcacttgtagtaaccgctagtcgggaggctgaggtgggaagatcgcttgaacccaggaggtaggggctgtagtgagctgtgatggtgccactgcattccagcctgggcaatagcaagaccccgtctcaataataataataataggccaggacttgctagatgggaggccggggtttgacctgacctctgacctctgggcagtcaggtaggtaggccgccatctctgacccacatctgccacttggctttcgggctccatcctaccatatacctgcagagtgtggctcagtcagaccggcagcagcgtggcctcacccaggcgggcctgcctgcaggacaggtttgtccgccccagcccccaaactcagaggccggctcctgtgggtaagaggggagcaaagaggtcagggctatgtcagggcccggaccccttgagggacaggcagccatttgatggctgttccccccacaccccaggtgactgcatccctcctcagcctctaaccctccacggctctccagcgccctcctcacctcgcactgagggcccgtgtggcttggccccttgccacctctccaggtatctctttctctctcttgctccactgagccaagctctctctctcaccatctgagatcacagaatggaaataagaaactgtgttatatagcaatcaagccaggcacatgcctctgactacatccacttttgcttacactccttccatgagggcaagttggttctttttttttttttttaactaaaacgtaaaaacacacacccctgccctttcctcaggtgtcccacgcccaccaattcctcctctctggtccccgcgtccttggctggtgttagaaaaatggctacaagcttcctgggaatcagataataaagcttacaggaactcttcccagatttaaaagagcttaataaataaataaataaagcttaccttctagaggggaaaatagataaaaccaataagaaaaacacatgttagaggctaataagtgctaaggagaaaaataaaagaatgaaagacaaaacaaaaacctagccgggcgggggggcgcggtggcttacgcctgtaatcccagcactttaggaggccaaggcgggaggaacgcttgaggagttcgagaccagcctaggctacatagtgagaccctgtctctacaaaacaataaaaaaatttttaaaaatcgctggccatggtggcaagcacctgcatcacagctgctcaggaagcttaggcaggaggatcacttgagtatggcagtcgtcgctgaagtgagccaagatggcaccactgactctgtcagcccagataacagtctcaaaaaaaaaaaaaaaaaaaagatgactgggcatggtggttcacacttgtaatcccagcactttgggaggctgaggcaggcagatcacctgaggtcaggagttcgagaccagcctggctaacatggcgaaaccctgtttctactaaaaatacaaaaattagctagatgtggtggcatgtgcctgtaatccaagctactcaggaggctgagatagaagaatcacttgaacctgggaggtggatgttgtagtgagccaagatcgtgccactgcactccagcctgggtggcagagcaagactccatctcaaaaaacaaaaacaaaacaaaacaaagcaaaaaacggtgagagggcctggtgccccctctggaatgtttttcattgtctaggtttgacactgtgctgtgccatcacgtgtggggctggggaaagtgcagattccggggcacacgcctgcccttggagcagggatggagtcagctccatctatagggtctggtctgggaggagggagagggtgcttgcccagagcaggctcagaccctaagcctgagcctagggaagggtgagccgaccctggaggcaaatggaccacaatcccccctccccatcaaccttcaccagcgattccgggataaatgacacagacagcactgagaattccatggtagtcgttattattactgttgtttttattaatagcaggggccccatcacttacctgtgggttatcaatttattacctctcagttccatttgtcatctggtgccaggttaggctttgtcaatagagggcgctggagagccactgaggagccagggcccctctgcctcactccagggctttgtgttcttcctactgcgctgtgaccagcaggtggctgctatgctccacattatagggagtgacctccactgccaccctctcctccttctccctcctcctcctccctcctcctccctcctccttctccctcctcctcttccttcctcctcctcctccctcttcctcttcctccctcctcttttctttcatccctcttcctttctcctccttcttccttctccttccttcaccctcctcctcttccctcctccttttttctctttctcctcctctttcctcctccgccttcttcctcctcctcctccttcttcctaccccttctcctcccccttcccctttcttttaaaagacggggtctcagccaggcacagtgactcacacctgtaatcccacctgtaatccctcactttgggaggccaagacaggaggatcacttgagcccaggagttcgaggctgcagtgagctatggtagcaccactggactccagcctgggcaatagggggagactttgtctgagagagagagagagagaaaatgagaatcgcaccgtgtcgcccaggctggagtacagtggcaggaccatagctctccagtgccttcttgagtctagctagggacttgtcacttaacccaacagatctatttaaaacatgaagtagaatcattgtttctcacagaatcagctgccttctcagatcctctacaaatggaaacagaatcatgcaaaacagggaaggtaaagggacaagaaaatggtctttttgaagagctgctcccagccctgctggacaaaatgaccaaaataggatccctggtattaaagttcctctcataaaaatccattcagaaaattgaggacactttgggaggctgagatgtgaggattgtttgaggccaggagcctgggcaacagaacaaggccctgtctcaaaaaaaaaaaaaagaaaagatacatatatatatatctgtacccagagtcaagacaagcaatatttgttgtctaaaaacaactctggttcagggtacatcagttaacttttttttttttttttttttgagatggagtctcgctctgtgtcccaggctggagtgcaatggtgcgatctcagctcactgcaagctccacctcctgggttcacgcaattctcctgcctcagcctcccaagtagctgggactacaggcacccgccaccac[134 bp omitted]acccagcctttttttttttgagacaagagtcttgctctgttgcccagtctggagtgcagtggtgcaatctcagcttactacaacctccacctcctgggctcaagtgattttctgcctcagcttcccaagtagctgggattacaggcgtgcgccaccacacctggctaatttttgtactttttgtagagacagggtttcaccatgatggacaggctggtctcgagctcctggcctcaagtgattctcccacctcagcctcccaaagtgctgggattataggtgtaagccaccacgcccagcccaagacagatactttaagaaagtaaactggccaggacagtggctcacacctgtaatcccagcactttgggaggccaaagcaggcaaatcacttgaggtcaggagtttgagagcagcctggccaacatggtgaaacccggccttcactaaaaatacaaaacttagataggcgtggtggcaggcacctctaaatccagctacttggaaggccaaaacagcatcatttgaacccaggagatggaggttgtagcgagccaagatcctgccactgcactgcagcctgggtgacaaaacagggctctgtctcaaaaataaaataaaataaagaaaaagaaaataaagaagggaacttaggttaagtgaggtcataagggtggggccctgatccctgatgtccttatagaaagagacaccaggagtgcacacacacggagggaaggccatatgaggtcacagtgaaaaggtggccttctacaaaccaaggacaaatgcctcaggacaaaccaaccctgctggcaccttgactttggacttccagtctccagaactgtgagaaataaatgtctgttgtttaagccccctagtctgtgatattttgttacacagccctagcagaccattacattcagtctcttctttgcttcccactgtgtcctttctaccaagcaccatgcctagcacatagtaagtacccccaaaaagatgcacaaacatcatcgcctcctgtgggaagctgtccctcacccttctccactccttctccccttagcttaagtgcctcttctcagcttcagttcctacactttccacttggctcttgaagaatatgttttgaggtctaattcctctctagcaggtgaaatgtttgaaggcaggggctgggtcttccccagggctcagcaccaatggcatgcaccatcagaattttttgttttgtttttttgagatggagtttcgctcttgtcacccaggctggagtgcagtgacccaatctcagctcactacaacctctgcctcctaggttcaagcgattcttgtgcctcagcctcctgagtagctgggattacaggcgcccgccaccatgcccggctaatttttgtatttttagtagagatggggttttgccatgctggccaggctggcctccaactcctgacctcaagtgattagccaaccttggcctcccaaagtgctgggattacaggtgtgagccactgcgcctggccaggagtttaataaatatttgagtgaaagtaagtttcttgaccttgacgcatgggccctagagagctagaagacctgaattctaagcttcattcctgtgcaactgtggacactgagcctcaaatgtaatcatggtctggggtttttccagagatcaaagcttggggaaagtcctttgttctctgaaaggtacagggttattttcacatctgttatgaacactcgtgccgttgagctgagctcctgagtcttagtcagctgcctggctccaggtggacttcctgctgtacctcagatatactaagctcactcctgccttggggcttttgcgcttgctactgcttctgggaacacactgcccccaggctttcccatgatcccttaattttcagggtctacaccacagccaaggcagatgacactgattgcaaggaaacaactcggttacagggcattggggaacagaagaaatgccactattcggctcacgcctgtaatcccagcactttaggaggccgaggtaggtggatcacaaggtcaaaagatcgagaccatcctggccaacatggcgaaaacccgtctctactaaatatacaaaaattagctgggcgtggtggcccgcgcctgtagtcccagctactcaggaggctgaggcaggaaaatcgcttgaacccaggaggcagaggttgcagtgagccgagatcgcgccactgcactccagcctggagggcagactccatctcaaaaaaaaaaagaagaagaaataccactgctctattagttcatttaatcccctcaatgactttgagaggtacacactttttttctttttttttgagacaggttctcactctgtcacccaagctggagtgcagtgttgcaatcatggctcactgtagcttctacctcctgggctcaggtgatcctcttacctcagcctccccagtagttgggattacaagtgtgtgccaccacacctggctaatttttgtattttttgtagccatggggattcgccatgttgcacaacctggtcttgaactcctgagtccaagcaatcctctcacctcagcctcccaaagtgctgggattacacatgtgagctaccacgaccgggagtatgtaccttttttttttttttgagatgacgtctcgctccgtcacccaggctggagtgcagtggtgcaatctcagttcactgcaacctccccctcccaggttcaagcgatcctcctgcctcagcctcccgagtagctgggattacaggtgcctgccaccacacccagctaatttttgtatttttagtagagatggggtttcaccgtgttggccaggctggtcttgaactcttgacctcaggtgatctgcctgcctcgttctcccaaagcgctgggattacaggcatgagccactgcactcagccactcagcccttttttttttttttttttttttttgagacatagtctcactctgttgccctggctggagtgcagtggcatgatctcagctcactgcaacctctgccacctgggttcaagcgattctcacgcctcagcctcccgagtagctgggattacaggcttgtatttttagtagagacagggattcaccatgtcggccaagctggtctcgaactcctgacctcaggtgatccgcccacctcggcttcccaaagtgctggaattacaggtgtgagccaccatgcctggccaatatgtactattaatatgcccatttatgatatgaccatttaatatgcccagatgaagagattaaggcccagaggggttaagcaatttgccaaaggtctcacaactagtaaataacagggccaggatatgatgcagacagtttggatccagcattcagctacctaggctgcaaggctctctgcttctcagtgtacagttaagcttagttagtgtaggatctggcatggggagttgctcaataagcaactgaaggcaggggctttttatttatttttctacttctttcagacatttaactctccaaatcttacagtccaaccccccaagccaagccaacaacccttcctataccatcttgccagagcccagggtccctcactccatcttctcatgccttcctggcccataaaaaggattcaataatttgtagtaattagctgggcatgttggcatgtgcctgtagtcccagctcctcagaaggctgaggcaggaggatcgccgaggctaggagtttgaggccacagtgtgctacgatcgcacctgtgaatagccactgcactccagcctgggcaacacagcaagaccccatctctaaaaaaacaaaacacaggaaacctgtattgtagaccagcttattaaaacagaaagaaaataaccaggtgtggtggcacatgcctgtaatcccagctactcgggaggctgagacaggagaatcgcttgaacctgtgaggcagaggttgcagtgagccgagatcgtgccattgcactctagcctgggcaacagagtaagactctgtctcaaaaaaaaaaaaaaggaaaaaatatgaataataaaaaattgtagcaattatcactagggcttctcagtgagaatcagtgagaaactccaaaggttctgaggctgtaaagtatattcccaaccacctttagggtcaaagttgggacaagatgaactaactgtaaataaggcttgttgagtgagaggacttctcaaccaatccaacccaggatctaccagacaagcacttcctgaaggtaatgtggttcaggggtgatctcctgggtcaggcagatctgggtctgaattccagcttcggttactcctcagggagtaaccgaagctggatccgcccgccttggcctcccaaagtgctgggattacaggtgtgagccatcaagcacccagccggttttttttttttttttttttttgagatggagtcttgctgtgtctcccaggctggagtgcagtggcgcaatctcagttcactgcaacctctgcctcccgggttcaagcgattctcctacctcagcctcctgagtagctgggattataggcatgcgccaccatgcccagataacttttgtatttttggtaaagatggggtttcaccacgttggtcaggctggtctcgaactcctgaccttatgacccacccgccttggcctcccaaagtgattggattacaggcgtgagccatcatgcccggcctcgtttcttcatctttcaaataggaaaaacacagtgtgaggtgtgatgaagaactcaggcttggattcaggtcttgcatcattctactccttgctcagccatggactagctgtgtgagctgagatgaggagcttcacctctgtgagccttggctgcctattccaatgcgtgttggcgtcattctgtttcctatagtggctggggattccctgggaccatgtgtgtctgcactgtggtcactgtagttggcaggatggaggcagtgtataaaaatgtttaggagcttaggctctggagtcagactgcaacaggcctagttcaaattccagctctgacaattactcccagtgagatcttaggaaaatcagtttcttctctgaacctgtttttgtttttttgttttgttttgtttgagacggagtcttgctctgttgcccaggcttgagtgcagtggcgcgatctcggctcactgcaacctctgccaggttcaagtgattctcctgcctcagcctccccagtagctgggatcacaggcatgtgccaccatgcccagctaattttttttgtatttttagtagagacagggtttcaccatgttggccaggctggtctcgaactcctggcctcaaaggatccacccgcctcatcctcccaaagtgctgggattacaggcatgagccactgtgccaggccaaacctcagtttttgtatctgtcaaatgagaataataacagtaaatatccgatagagtttactatgaagagtcaatctgatgatgtaggtaaagcacttaaaactggtctggggcctggcacagtggctcgtgcctgtaatcccagtactttgggagtccaaagcaggaggatcccttgagcccaggagtttaagtccagcctgagcaacatagtgagaccatctctacaaaataataataataaataataaattaattaattagtgatgcatggtgttgtgcacctgtagtcccagcgacttgggaggctaatgtgggaggatcctttgaccccaggaggtcaaggctgcagtgagccatgatcctgccactgtgctctagcctgggcaagagagcaagaccctatctcaaaaaaaaaaaaaaaagcaaagatattatgagactgattttttaaatacctttctctaggccaggtgcagtagctcacgcctgtaatcccagcactatgtgaggccgaggcaggaggatcacttgaagtcaggagttcgagaccagcctggccaacatggtgaaaccccgtctctactaaaaatacaaaaattagccgggcatggtggcaggtggctgtaatcccagctactcgggaggctgagacaggaggatggcttgaaccccgggaggtggagattgcagagagctgagatcgcacaactgcactccagcctgggcgacagagcaagactctgtctcaaaaataaataaataaataaataaataaataaaatacctttttgtacatgtcagtccattttcccaaaaccagggccaatgtgatcagaccccatccccatctacaaaatcaatcctacttaatcatagtgtagcttgaaggttgggctctcaccacagcagggttcgagttccagcaatgcccgtaactgctgcgggaccctaaataaacgacttcacctctttgaccctcagaggttaacctggcatagtaatcgcctccctcacggggttatttaggtttcaacgagttgatgcacaagcgtggcacatggaaagggctcggtaaacacgaggtgctattactcccaccacagtgccagtccttctcccttttttactttattttttatttttattttttgagatggagtcttgctctgtcgcccaggctggagcgtagtggcgccatctccgctcactgtaacttccgcctctcgggttcaagcaattcacctgcctgggcctcccgagtagctggggttacaggcatcccccaccacgcccggctaatttttgtatttttagtagagacggggtttcaccat[138 bp omitted]gggacgcctcaggctgtctcggtcaggacctacagctccggttgttgtcccaggctcttccgcgaggtgctctcctgtctcctgaccacccccattcctccccactccagctcctcagcgagcggctgcgaaggacgcgcacaacaacactccgcgcagcgggaaggtaccgaactcgcatcgcagcctgaaactgctcaactaagctcccgccccgctgctctctggtcaatctaaagcgaagacgagccttagggccaatcagaagcgacagcggtggagtcatgcccgcctgcttgaggcgccctggcgtctcattggctatgcttgagaacgaatcccaggctaagccacttagaaaggagcggagccagccaatcagcggtgcaaccgccgcgggggccgggccagaagccccgcagacaagcacctcgggagactggcgaggggcgagctcgcagcttgttagccccgaagccctgcccagggggaaaccctgctggagggagtctaacccccgggccagttaatgttggggcagcgcaatcggccgttccctctgcggtatggttggaggtgggagtgctgacacgtccgcgcgcagttactcctggctgagcatacagtcgaggtggcagtgggaattggaagtgcaagtgtcacgctgccaatcacggggcaaggcactgcccccctcttgtgtctttcctgtccctgtacacttccaggcttccaggcgaggcagagtgagctgtgccagcaatcgtggtggagtgggacaagagagaaaagggagctgttcacaggcaccgaagcctggctggctctttttttttttgagacgccgtctcgctctgtctcccaggctggagtgcagtggcgcgatataggctccctgcaatctccgcctcccggggttcaagcgattcccctgcctcagcctgccgagtagctggaattacaggcgcccgccaccacgctcagctaatttttgtatttttagtagagacggggtttcaccatgttggtcatgctgatctcgaactcctgaccccaggtgatccgccctcctcggcctcccaaagtgctgggttttcaggcgtgagccaccgtgccctgcctggctggctcttttattttatttttatttatttattagagacagggcctcactgtgtcgcccaggctgcagtgcagtggtgtgatcatagctcactgcagcctcgacctcctgggctcaagcgatcctactaccacctggacctctcaaagccctgggattacgggcatgagccaccgtgcctggccttggcttgctcttacgggcctcccagccaatcaggtgtggcggcagcctacacaccccctacacacctcacagatggtaaagggttgagagaaaggtgacagggtttgcaaatgggagctacttagggtggcaaaatagaagcaagaaaggcaggtcaggcacggtgtctcacggctgtagttccagaattttgggaggcccaggtggaaggattgcttgagcccaggagttcgaggctgcagtgagctatgattgcaccattgcaccccagcaccggcaacagagggagac[137 bp omitted]tggtgaaaccccatctctactaaatgtacaaaaaattagccgggcgtgatggcgggcgcctgtagtcccagctacttgggaggctaaggcaggagaatggtgtgagcccgggagtcggagcttgcagtgagcagagatcgcgccactgcactccagcctgggcgacagagcgagactctgtctcaaaaaaaaaaaaaaaaaaaaggacagtagtactcctgagcacttgctgagggagcctccagggctgttcaggtgaaggagaatcagggtccagtctcttcgtggagagagtgggaaaaggcagactccacagcagatcaacgctggggcccggctggaaatcaatgaaatctcagcctaagaggcctgaagcctatggaccaatgagactcaaggctctgccccttcacagccaatcagctgcgggtccgaggcagacgcgcgggagtggcgctgtcctaggtgcctcccaggctgcccagcgtgctcagctggcctgagcgggagaatgcggcccgcgctgcagccaatcagcgtccgcctcaggatccaggggtgaccacgtgcgggagcgttgcgtccctggcctcgctccattccccacttttaacggtcactcggccttaagccgtcctgggtgtatgtgaggctgaaagggaaggaggaacagggtctgggccggtgagtgccatagtttttcttactttactttcttgggcttgggcccggcccaggcaaatctggggtatgggggcttgactggacctcgttgatgattgggaagtgcgggttgagggctttagcccttggggctttcctctgcctttgagaggctggaaatgcagcctcctggccacctttaggcctaggtttggcagaggctaagccagcttgctctctgagttggtccacggcccccgaggccagcctgagtaggaagggtgttgtggggaagttggaggtccttaactctgcatgaggtatggcctccggacaatgagagcttatcaagggtctctggactgagcctggatccgg[144 bp omitted]gagaaaccctgtctctacggggtttctaaaaaaaattacctgggcgtggtggcacacgtccgtaatcccagctactcagaaagctgaggcaggagaatcgcttgaactcattgaactcaggagatgaacgttgcagtgagctgagatcacgccattgcactccagcctgggcgacagaatgagaccctgtctcaagaaaaaaaatgaaaagaaaaaaaaagttatgtaggaagtcactggccaagagatgaaactagtgtgcacatgaaggtttcctggggtctttggagccagcctgggctgggagtgaatgttctggactccaggttgagatgttcttggcagatttcccagtatggagtccaggttggatgatgtggccaagaggttaggccagtaatcctctggagattctagggagaaggattctgaatcccagccgagctgtttgcgctggatgaagtattattgccttgtggtggctctgtacagaactgggattgggtggccaggcgtggtggctcacacctgtaatcccagcactttgggaggctgaggtgggtggatcaccaggtcaggagctcgagaccagcctgaccaacatggtgaaaccctgtctctactaaaaatacaaaaattagccaggtgtggtggcaggtgcctgtaatcccagctactcaggagtctgaggcaggagaatcccttgaacccacgaggcggaggttgcagtgagcagagatcgcaccactgcactccagcctgggcaacagagcaatgctctgtctcaaaaaaaaaaaattaattaaaaaaaaaaaaaagcagggccaggcgtgggggctcacatctataatcccagcactttgagaggccaaggcgggcggattacctgaggtcagaagtttgagaccagcatgaccaacatggagaaaccccatctctactaaaaatacaaaattagctgggcgtggtggcacatgcctgtaatcccagctactagggaggctgaggcaggagaatcgcttgtacctgggaggcggaggttgcggtgagccgagatcgtgccattgcactccagcctgggcaacaagagcgaaactccatctcaaaaaaaaaaaaaaaactggaattgggtcatgtctggagcttttcattctccctgtcccactctttcccatgcctgttctgataattcctagaagatgaagatatcaggctgtaggtgcggggcaggtgcatggggaggatgaacatcgtagtggagcacaggaagaggtgtgtgagatattctcctctttaggaaatcacccaggtttttggcagggcgtggtggctcacacctgtaatcctagcactttgggaggccgaggcaggtggatcacctgaggtcaggagttcaagaccagcctggccaacgtggtgaaaccccatctctactaaaaatgcaaaaaattagccgggcatggtagatgcctgtaatcccagctacttaggagcctgaggtaggagaatcacttgaacccaggaggcagaggttgcagtgagccgagatcgcgccactgcactccagcctgggcaacaagggcaaaactctgtctcaaaaataaataagtaaataacataaaggaaatcacccaggttgtctttactgatgatcttttttatactcatggggcagggtgttgatacctagtttcattcagctgttcagtggtatttatgctttcggagtgccttcagtacacccagagttctttaaccaggggtgagggtgcaaggagtggcttatgagtggacttcaaggaagtctaaccccgaaaccagttaatattggggcagctcaattggccattccctctatggtgtggtgggggcccggggtgctggcacatgaagtgtgcagttaatcccagctcggcagacagccaccaagcatgatggcacatgcctgtaatcccagctactcaggaggctgagatagggggatgacttgagcccaggatgtcaagactgcagtgagccatgattgtgccactgcactccaggctgggtgacagagcaagactgtgtctctaaaaaaaaaaaaaaaaaaaaagaacaattaatggtatgcatgtatattatgaggaggggagggtaaagaataagctagacgatagttaacctctccagccatgaggctcagagtaatctgtcaatctcttgtcatgcattcatatgccaagtggtataagtgtctaccattttctttttttttttttttttcgagatggagtcttagctctgttaccaggctggagtgcagtggtgtgatcttggctcactgcaacctccgcctcccgggtttaagcaattctcctgcctcagcctcccaagtagctgggattacaggcacgtgccaccacgcccagctaatttttgtatttttagtagagacggcatttcacca[139 bp omitted]ggtggctcacacttgtaatccctgcactctgggaggctgaggcgggtggatcacttgaggtcagaagtttgagaccagcctggccaacatggtaaaacctcatctctactaaaaatacaaaaattagccgggtgtcgtggtgcgtgcctgtagtcccagctactcaggaggctgaggcaggagaatctcttgaacctgggaggcagaggttgcactgagccaagatcgtgccactgcactccagtctgggtgacagaaggagactctgtctcaataaaaagaagagttagtcccatgggtgacattctgaacctgatggtgactccctaagagatttagaaccattggaataaagtaggttcctatattatttatggggcctgggcaagatgacagagactccctcgtctcttcccatgcctggtgttggcccatacttcaaggtgtctcacattctagcctgcacatccaagctcagtctacaaatcccttacacaaaatcagggtctagcgtgtgtgtacatcagtcagagtccactctcatgaatacaggcctggggttgagtcctgtgtagggggcctcagagtcatttggtccaggaaatccagggtgctgagttctcagagcatggtccagaagtgaggtgggagctcacagttccgggtaggcactttctagatgccttttgactcagcctatgcgaagggatacagccagaggaggtccaaatgggaccctttgcccaggtttaagtcaacactagtattctgtactggtcttgaaacagcccctgtgaggaaattgagggtcttggaagacttagctccatatgagtgctgaagagaagggccattcactgtgaagggatgcagtgaaacctgttttccaacttctagtctagttctttttccagttaatccacaaagtgtgtgctatgaaggggctagattcagctcacctgggtatgactatagctggttcttggatcatatagagcacaaatttaagggaaaaagggaactaattcactccttgtggtgactcttttctggaagtcttggatgtacttaaccagaaagacggaacatcttttttttcttttttcttttttctttttttttttttgagacagagtttcgctcttgttgctcaggctagagtgcaatggcgcgatctcggctcaccgcaacctccacctcccgggttgaagcgattctcctgcctcagcctctcgagtagctggaattacaggcatgtgccgccacgcccagctaattttttttattttttgtagagacagggtttctccatgttggtcaggctggtcttgaactcccgacctcagatgatccgcttgcctccacctcccagagtgctgggattacaggtgtgagccactgcgcctggcgaaagagtaaacatacttaaagttcatgtaagatttggataatcgctcttaatctatataaaatgctgtggggaatttaaccaccttcatttgtggaaagagatgggttcacgggaagagtggcgagttcacagaatttttctaaattgaatcttgttcaacttggcttgggaagagggcttgatatttaaaataagtgaaatagagggagaactttttcacaaaacaaatgatcatccctcccattggtctattctgatggtttgattttaattataatatttaaggagaattggtatttgtgttgctgtgttgacattgttacatcaagctgggttgtgcctcaagaagttcatgatacaaggatttctgggaagctttgactttgcagccagggtgtgccccgagccccttgcacatttttcccttagtgtcccattggtcaagtctaccagtaagaataagaactatcagatttcaggccaggcgtggtgcctcatgcctgtatcacagcattttgggatgccaaggcgggcagatcatgaggtcaggagttcgagaccagcctggccaacatggtgaaaccctgtctctactaaaaatacaaaaaattagccgggtttggtgatgcacacctgtgatcccagctactcgggaggctgaggcaggagaatcacttgaacccaggaggcggaggttacagtgagccgagattgcgccactgcactccagcctgggcaatagagcaagactctgtctcaaaaaaaaaaaaatcagatttcaaattttattcagtaatacgagtattaggccgggcatgtaggctcacgcctgtaatcccagcactttgtgaagccgaggtgggtggatcacctgacatcaagaatttgagaccagcctggccaacatggtgaaacaccatctctaataaaaatacaaaaaattagtcaggcatggtagcagttgcctgtaatcccagctacttgggaggctgaggcaggagaattgcttgaaccgggaggcggaggttgcagtgagccaagatagcgccattgtactccagcctgggcaacaagagtgaaactctgtctcaaaaaaaaaaagaaagtaatataagtattaaaaaggactgagaggctgatatcatattgccttttatcacatactccccttccaatcatgccctacctaatctctctacctgctctaccctctggcaggacacaggcttgtgtctgcataacctgttgtttctttgctctttccagagagacaactgcagatgattcctaccgagtcagcccaggaagaggaagggggggcaaggtttttgagtctagggagggggagtacttttaagaacagcaacagaccaggcatggtggctcacacctgtaatcccagcagtggatcacctgaggttaggagttcgagaccagcctggctaacatggtgaaaccccatctctactaaaaatacaaaaaaattagccgggtgtgatggtgcatgcccgtaaccccagatacttggaaggctgaggcacaagagtcgcttgaacccagaggcagaggttgcagtgagccgagatggcgccactgcactccagcttgggtgacagaacaagactctgtctcaaaataaaaacaaaacagcaccagcagtgtccctactcttccaagtcaaagtgctgtctgcttctgccatctgtgctcagtgcaggatggcttgggttgcactgtcaagaatgcaggaagaggctagagaagtgctcagggtgtcatcagcataagggttgcagtgcaaagggccctggagataattctaggaggcggtctctaaggggatatccttaggtggggttccccattcttgggggcttttgttcactgaaaggggagttcccttgcccctcctcccttttaggttccccgaaagcccactgatgctccctgtcaactatatttggcttacacagaatgctgccctttgagcagtctccaactctctcgatcatcaatgagcaaaccagcgggggagctgagtcacaagcacatgatgtggggctggaaagcgagggggccacactcagaggggtgaccatgtaatcgtccagacccctgtacctttcctcatccctggggctagtccctcagggctttccgcactccttccttgtcttgagggactctgtatttctgtgttggaggaagggtgtttccctctgcgtacatacatatcagagggactgatgctttatgtgtcttttatatgggtgtggtggtgtgaggaattggaaagctcagaaatggaaaatagttaacgttcagagtagcagatgaacacagctctcacatttgcattttccctttcgttctgactcatcttcccctctccccaccctgttgcccctccaccagcctcacccattgacacaccctgtctgatctaggaagggttaacatgtgcctgcacccatgtggagggaaggcgtggtaggcctggaaagagagagtgggaggctggtctgaacattcgagggtcctggagccaaaggaagaaacgggagcttagggacagtatttgcatctaggaggggacaaggactcttagatccttcccccttaagagaagcctatgggaggccgggcgcaatcccagcactttgggaggccgaggtgggtggctcacttgacatcaggaattcgagaccagcctggccaacatggcgaaaccctgtcactactaaaagtacaaaaattagccgggcgtggtggcgggcgcctgtaatcccagctactcgggaggctgaggcaggagaatcgcttgaacctgggaggcagaggtcgcagtgagctgagattgcgccactgcactccagtctgggagacagagcgagactgcgtctcaaaaaaaaaaaaaaaaaaaaaaaaaaaagagaagcctatggggaagccgactgtgccttgtcaccagagcagcttaccagtacctgacttgtttatcttccagtcatttactgtgtatctaatatacgccaggcacatatcataaatgctttatccgctgggcgcagtggctcacgcctataatcccagcacttcgggaggccaaggcaggcggatcatttgagcccaagagttcaagaccagcctgggtaacatagtgagacccctgtctctaccaaaaattcaaaattagctaggcatggtggctcaaacctgtagtcccagctactcaacaggctgaggtgggaggatcatgtgagcccaggaagctaaggctgcagtgagccgtgatcgtaccactgggcaacagagcaagaccccgtctcaaaataaacatgtcatcaaaatttgttggataaatgaaaattttgctataggatcagggataagagaataataagaaacagaaaaagaaagttgagcctctaagaccccatcccttccccagattaaagagttctgaagtgtgaaaagaggggaaacctccggggaccttgaccccttgggcaggaagtgaaagaaacccaagtcctgatttcagagaaatgtcatttgtcatcagcccaagaaaaggagatttttctcttcgaagaccaccacacgtccttcctggggttgcccctttcagagcttgatgggaggatctgagtcactcacacacccacccccaggtcattcccaggcagcaaatgaggcttcccagtaccaagtcagggagagggaggaggccagcttctggctcctccaccctattcttgggatccaaatgtttcaatcctttttacttctgcagctgtgtgctctgccgtcatctctaagaaacaaccataccactgaatgctactgtgtacttacaaaccacactcatattcgtcacgtcatttcatcttcacccccacctccaaatgaggtaagcagatattatgcctatttcatgaatgaggttactgaggcccagagaagtgacttgcccaaggtgactcaaatagtaaatggcagagatgaaactcaaaggcagggctgattattccaaggtccttgctgccacagatacacttctttgactctaggagttcacaaacgaagtgaggagacaggaggctaggggcagaatgtgtgcattctggaggtagagggggtggtctctcctgcaggcagaaggcagaggcagggttagaaaaccacaccccttcggggggactgtggcagactgatacttgggacatccaatggaggcctgtgaggtcaggggcggggctagctccagggggggccccaggagccccaacagtagttcagagcatgcggtgtcctggaagaagctacaagcggtgagtgatagcctctctccagctgaggccttcttcccatcacaactctttctgtctcctccctgccaacctagagccctctccctgaggtgtccaagtgcagccctccctgccccaagggcccttgctcacagggaacctgcacctaggactctgcctgctgggtgctaagacactgaggttctggttctcttcgtatctgggttcccagctctcttcttaaaagccaatgtggtggttttgatgtgtgagaaactcctgcctggttgggtgctgtctttctattcttcactttttgtcttatgaaaaacaaattaaaccatctccttacccaaatcttgagaggaaacagcctccctgtctccagtccccacgtcctttcctcccatctcctcaggagtccattctccaaaaggtctctccatcattgggtcaggagcctcctctcctgtggcttctgcacctgctctcctctttctctggatgggaatgtctggttccttccctgaggatgtgttctagaagcttcagcttcacagtgatgactgccggatgccttagcgcctgcgctcctgcagccaggatccctatcatgctgccctctctgcctttcaggagcgatgggcttttgggggaggacccactagctttctaagctctcccgtgaaactgtgtcatgctccatcccttagtgccggcgttgactgggttttgtggtgatccttgtctggaatgaagaaagcctggcttgcgcagaggtgtttccctgcagaggggcttggagaagcagaagtggcagtatctgctatcttttacgtcagagactgccaactggcagacttcccgcacgcctgtcttaaacccactactagatatttctgttaactgactggcccttgctctttaagtcctgaatttggtctgatttccattctctcgccaccatgcctacctgctatgattctggataagctccaatcctctcttgggttactttatttgctcactcaggacagagggctctgatctaggaccagcaactcacaccctctcccctcacatccacaggcttgaaatgagatgagatgttcctccctcccctttcaaccatggacctcacactgtggacttcctcttagagcctctgagttaggtacccaagccaaggcacaatgtccctgccccccataagactgcccagcccctatggctctgatcggctggtacagctagcagccaggctccggccagcactctgtgatactctgatcaccgtagggagccaggagttccccgcccacagcctggtgctagcaggtgtcagccagcagctgggccgcaggggccagtgggctctgggagaaggcatcagcccttctacctttgcccagctcctgaactttgtgtatggggagagtgtagagctgcagcctggagagctaaggccccttcaggaggcggccagggccttgggagtgcagtccctggaagaggcatgctggagggctcgaggggacagggctaaaaagccagatccaggcctgaagaaacatcaggaggagccagagaaaccctcaaggaatcctgagagagaactgggggaccctggagagaagcagaaaccagaacaggtttctagaactggtgggagagaacaggagatgttgcacaagcactcgccaccaagaggcagacccgagatggcaggagcaacgcaggaggctcagcaggaacagaccaggtcaaaggagaaacgcctccaagcccctgttggccaaaggggagcagatgggaagcatggagtgctcacgtggttgagggaaaatccagggggctctgaggaaagtctgcgcaagctccctggcccccttcccccagcaggctccctgcaaaccagcgtcacccctaggccctcgtgggctgaggccccttggttggtggggggccagcctgccctgtggagcatcctgctgatgccgcccagatatggcattcccttctaccatagcacccccaccactggagcctggcaggaggtctggcgggaacagaggtgagtggcggggtctagtgctctgcctccaggctgggagggcatggcccaggaggggcagccctgctgggtggaagggcactgcatctctactgcacagttcctgagctggggaagagacaagaagctgctgccacagggcacgccaaagcccagcccccgggggaggacttgggataccccctcttcacgaaggggccaggctcccaggtttagccaaggctgtaactcttccccaccccatcccaggatcccactgtccctaaatgcccccaaagggctctggagccagaaccagttggcctcctccagccctaccccaggtaagcccctcgctgtcctgcatacacctgtaacatggtgtcttctctgggctggggctcgaggagtccagcctgagcagggcccctacctcccactgttccttccaggttccctcccccagggccccgcacagctcagccctggggagatggaagagtctgatcaggggcacacaggtgagtcgggcgggggcactcgtgcctcagccccactgtagcccttgatttcctgcctgaatggtacagtgagttggcgctgggattcctggccctgccctcctttgccttctctgtccccacaggcgcacttgcaacctgtgcgggtcatgaggacaaggcaggctgcccacctcgcccgcaccctcccccggcccctcctgctcggtctcggccctatgcgtgctctgtctgtggaaagaggttttcactcaagcatcagatggagacgcactaccgagtccacacaggtatgggcgccctgccctgtgtgaactgtcggctttcttcccaactccgctcctgagtctccacctgtgtgcccggttcccgcgcaatcccctagccccgtggcccgatccacccctaacttggccagctttcgccgccttcttccttccttcaccggcctccccttccgaccgctctaggagagaagcccttctcctgtagcctttgtcctcagcgctcccgggacttctcggccatgaccaagcacctgcggacacacggggccgctccgtaccgctgctccctgtgcggggccggctgtcccagcctggcctccatgcaggcgcacatgcgcggtcactcgcccagccaactcccgcccggatggaccatccgctccaccttcctctactcctcctcgaggccgtctcggccctcgacctctccctgttgtccttcttcctccaccacctgacggggtgtcggtagcgtcttagccaagagtccaattaaagaacgaaaagcgggccggctcggcttctgacctggcaccgctgctacggcggcctagcaaattccgccccagaagcgccccaggaagggcgccgagtgccctctcctggacgatcgcgggtcgcagaagcccaggccagcgagccctacagagtgaggacactgaagtgtgcaggagcgaaggttaacagtaggggagattgtcgatctcatcaccataataaagagtttcctgtgccctcccttcaggactagaaagccgagtttagtctgtgcacacccccgcccacgccccttgtcctgtagcggcccctggtggccctgcgtccgctgtccagcgggatggacacttcttccacccccgaggcgccccgtcctccccaggaggcagccggccccgaggactcggtgtccgggcacaccttgcggcatgccggtcctggactggtgggggctgtgcgaccgcaagtcactcgccccttccactgcaatccacggcgcgcggagtctgatctgggaacgctcggcccgggagagagaggaacgcgtgctccgaccctgctttcggccacccgcctcctctccgggagcacacggaccccgagaccgcggcctctccggcgtcttccctccacaccgtgccaagccgccgccaggtcgcgcctggaacggagactgactatgctttccaccgctccttctccagcccacgcctcctgcagccgcgaactgcatttcccagggcctcgggggtcccggggcccgagcccgcggcaccctgggagtggtagtccacgcgggccgccggcctagccaagaacaatgggaggagcctggggctaggaccacacctcccggagacccggcaacccgctttccgggtcctggccgggaaccccgccgtcccggccctcgcgccctggctgccggcggaagaagcgaggcgtccggactacatttcccggaggcccccgcggttcgcccctctgcggccgcgacgcgggggtctgtgctccccaggtgcggtccgagggcgccggccggccgcggactccctctcccgtggtgccctgcgcgtggccggcccggcccccggtctcccgcggcggcgctggttgttgtcgtgcgccgcggccgccccgccccgcccccgctctctcccctccccccggccctgcgcacgggccgcccctccccccgcctccccggcccctctcacggtgccaagatggcggcggcggcgggcggcggcagttgccccgggcctggctccgcgcggggccgcttcccgggccggccgcggggcgccggcgggggcgggggccgcggcggacggggcaacggggccgaaagagtgcgggtagctctgcggcgcggcggtggcgcgacggggccgggcggagccgagcccggggaggacacggccctgctccgtttgctggggctccgccggggcctgcgccggctccgccgcctgtgggccggcccgcgggtccagcggggccggggacggggtcggggccggggctggggcccgagtcgaggctgcgtgccggaggaggagagcagtgacggggaatccgacgaggaggtgaggcggttggaggcgtccccggcgccgggtggggcggaggccggggcttccaggggtctgggttgtcccgggggcggcgtgggcaggccgggtcctcagggttccttcggagagacggggcacggagggagggcggctgcatgcagcttccgggggaaagggcctctggaagtgggtagagaagccccggctgcagccaggcactcgcgcccgatgtcggtcccgctgaagtgtcttgggccgatccttttcggcagctggcaaagctagggcggtggaggtttgggcgaggaggcagtggggactgcatgtccagccagtcgtggttgacagcggcagcgtggccttggcagacaggttggagctgtctgggctcttacctgtgggccgccccgccgggcctcgcaacctcctggtttctccagggccccagtttctcttggcatctcaggtagagtggtggagggcttcctcttggggctcgggttgaacaggagtgggatgaaggccgggactgggcactctagcaggtcagagctcagctcaggatttctcccccagcctttcagaacaggcaggaaggtgtgggttgcgttgccctggacggttaataacaacctgagagctcgcagtggagcctgtacgaaagccatctgatgccctccccgccccttcacttgcgggcccctgttcccaacttaatgcagaaataaattgtggcccgaaagggtgtcagtggaggtcccactttggtctgaattggactctgaaggaatctgagtatggggcctgctgcctttcctgaggagaccctgtcgtcttctctcttgggccagtgaaccatggctttggctgtgctggtgtggtccggcactggggatcggagttcgaaatacctggcgcctccatccctagggagagaccctctcttccactacccgcgacctttgagtctttttcgttctttttaaataggcaggggtatgctaagtgggaactggggatattcctcgatacctcagatggaacgagggctttggcactgactgctgtttctcccctccaccccggtcccctaaatcaggagtttcagggttttcattcagatgaagatgtggcccccagttccctgcgctctgcgctccgatcccagcgaggtgagtgacgggggaactccacctctttagcgtcacaggaatttatcctcgcccttcgtgtcagctcttccctgttcaactagcctctgtcagttgccgaatgtgttctgtgttcagagtccaagctagtctgggcagcgggggaaacacacaagcaagacttagtccctgccctcctggagcgccttcctctgtgtgtagggctggcttgatccatctccccacaactattctccttttaggtcgagcgccccgaggtcggggtcgcaagcataagacgaccccccttcctcctcctcgcctagcagatgtggctcctacccccccaaagacccctgcccggaaacggggtgaggaaggcacagaacggatggtgcaggcactgactgaacttctccggcgggcccaggcaccccaagcaccccggagccgggcatgtgagccctccaccccccggcggtctcggggacggcccccaggacggccagcaggcccctgcaggaggaagcagcaagcagtagtggtggcagaagcagctgtgacaatccccaaacctgagcccccacctcctgtggttccagtgaaacatcagactggcagctggaaatgcaaggaggggcccggtccaggacctgggacccccaggcgtggaggacagtcaagccgtggaggccgtggaggcaggggccgcggccgaggtggtgggctcccctttgtgatcaagtttgtttcaagggccaaaaaagtaaagatgggacaattgtccttgggactcgaatcaggtcaaggtcaaggtcaacatgaggaaagttggcaggatgtcccccaaagaagagttggatctggacagggagggagcccttgctggaaaaagcaggaacagaagctggatgacgaggaagaagagaagaaagaagaagaagaaaaagacaaggagggagaagagaaggaagaaagagctgtagctgaggagatgatgccagctgcggaaaaggaagaggcaaagctgccaccaccgcctctgactcctccagccccttcacctcctccacccctcccacccccttcgacatctcctccacccccactctgccctccaccaccacccccagtgtccccaccacctctaccatcccctccaccgcctcctgcccaagaggagcaggaggaatcccctcctcctgtggtcccagctacgtgctccaggaagaggggccggcctcccctgactcccagccagcgggcggagcgggaagctgctcgggcagggccagagggcacctctcctcccactccaacccccagcaccgccacgggaggccctccggaagacagtcccaccgtggcccccaaaagcaccaccttcctgaagaatatccggcagtttattatgcctgtggtgagtgcccgctcctcccgtgtcatcaagacaccccggcgatttatggatgaagacccccccaaacccccaaaggtggaggtctcacctgtcctgcgacctcccattaccacctccccacctgttccccaggagccagcaccagtcccctctccaccacgtgccccaactcctccatctaccccagttccactccctgagaagagacggtccatcctaagggaacccacatttcgctggacctcactgacccgggagctgccccctcctcccccagcccctccacctcccccggccccctccccaccccctgctcctgccacctcctcccggaggcccctactccttcgggcccctcagtttaccccaagcgaagcccacctgaagatctacgaatcggtgcttactcctcctcctcttggggctcctgaagcccctgagccagagcctcctcctgccgatgactctccagctgagcctgagcctcgggcagtgggccgcaccaaccacctcagcctgcctcgattcgcccctgtggtcaccactcctgttaaggccgaggtgtcccctcacggggctccagctctgagcaacgggccacagacacaggctcagctactgcagcccctgcaggccttgcaaacccagctcctgccccaggcactaccgccaccacagccacagctgcagccaccgccgtcaccacagcagatgcctcccctggaaaaagcccggattgcgggcgtgggttccttgccgctgtctggggtagaggagaagatgttcagcctcctcaagagagccaaagtgcagctattcaagatcgatcagcagcagcagcagaaggtggcagcttccatgccggtgagtgtggtccctgggcccagcggcacacccagccatccagcctccattctttgcaaccccctaaccttccgcctccttggacactttccagcattgcggggaaccctcagaacctgcctttctgtgatcccccaccttcctttgttcctccccagacctggcccttctctgtgctagttccctgtccctatcttccttttttttttttttttatttttgagaccgagtctcactttgtccaggctggagtgcagtggcgtgatctcggctcactgcagcctttgcctcccgggttcaagagattctcctgcctcagtctctcgagtagctgggactacaggtgcccatcaccacgcctggctaatttttgtatttttagtagagacagggtttcaccacattggctaggctggtcttgaactcctgacctcgtgatctgcccgtctcggcctcccaaagtgctgggattacaggcatcagccaccacacccagctccctgtccctatctttcctcactgtccagcccctgaccctgtttattccctgccagctgagccctggagggcagatggaggaggtggccggggctgtcaagcagatctccgacagaggccctgtccggtctgaagatgagtcggtggaagctaagagagagcggccctcagtatgcatcgggaggagggccctgaagaagactggcgggaggagtggggctgcgggagcgcaagctgcccacacacactccgatttctcccccagggtcccgagtcccctgtgcaaggtccccgcatcaaacatgtctgccgtcatgctgctgtggccctgggtcaggcccgggccatggtgcctgaagatgtccctcgcctcagtgccctccctctccgggatcggcaggacctcgccacagagggtaggtggggagactggacagccatgtcaggtttggggatgaccccacacttgggtgacatgcaccaagagcctaggagagagggagccaagtcaggtgctcaggggttaggtggcaagtgggctggagtgctaggtcctagagcaacttcatttgggggcaccaggaacctggcgctgtgagaaagcgagagccaggttgtgggaaagcagggaagtgaggtagaagcctggtggctttgtggctccatcccctcctccctgcctgctgcaatagatacatcatcggcgtccgagactgagagtgtcccgtcacggtcccggcggggaaaggtggaggcagcaggccctgggggagaatcagagcccacaggttctggagggaccctggcccacacaccccggcgctcactgccctcccatcacggcaagaagatgcgcatggctcgatgtggacactgtcggggctgcctacgtgtgcaggactgtgggtcctgtgtcaactgcctagacaagcccaagtttgggggccctaacaccaagaagcagtgctgtgtgtgagtagctggggcgtgacctcattcccgtggttgttggtcccctaggcttcctacctcactcctcttctgcctggccagagcagtggggttggcattcttgtggagagcttcctctcttcccccagaccaccagtcccctaccctggtgacgtgctgctcccctccccagataccggaagtgtgacaaaatagaggctcggaagatggaacgactggctaaaaaaggtgacgagctttaaggagcatttcttctcaaaaccgtgttagagtttgtgctgtggagggagctgtttttctttgctctcctcccttgcagctcaccctctccatcttctccgttgtgtgctttcatagctcctgcgttcattccctgccccgcttctttctggcttctctcccagtgtcccatgtccctggctgagctcaaatcctactaagtcccctgttcccgcaggccggacgatagtgaagacgctgttgccctgggattccgatgaatctcctgaggcctcccctggtcctccaggcccacgccggggggcgggagctggggggccccgggaggaggtggtggcccacccagggcccgaggagcaggactccctcctgcagcgcaagtcagctcggcgctgcgtcaaacagcgaccctcctatgatatcttcgaggattcggatgactcggagcccgggggcccccctgctcctcggcgtcggaccccccgagaaaatggtgcgaactgcttaatgctttctctgttgatcatttatttggtcttgtgtcttttgtgtaggagggacaaggcacccagacccagggctctgtcagtctgatagagaaggtggctgagggcggaggaggagacagtttttaggtggatgtacagaactggcctatgaggttctcagtgagcctaatgagtgagacttaagggtcatcctaggcctggtgcagtggctcacacttgtaatcccagcacttttgggaggccaaggtgggaggatcacttgagcccaggagttcaagaccagcctgggcaacatagtgggaccccatccctataaaagcaaaagttagttgtatgtggtggcacgcatctgtggtctcagctgctcaggaggctgaggcaggaggatcgtctgagcctgggagttcaaggctgcggtgggctatgggtcacgccactgcattccagtctgggcaacagagcgagaccctgcctcaaaaaacaagaaaaagaatcgtcctggcgggtcttggttagttaaagaaggccctgggaatccaggtaacatttggggttgtagaagaagaggggcgtggaaggggagtgacctcactgctcattgtgtcctgcctagagctgccactgccagaacctgaggagcagagccggccccgcaaacctaccctgcagcctgtgttgcagctcaaggcccgaaggcgcctggacaaggtcagcacggcccgctccgagagccccttccctccaggagctacctggcaagtcagagtgacagacacacctgagtgtcgtggtgtgtccacatgagaggacaggccctgagggatgaggcgggccttgcctgtctggaaagcaaaggggtctggatcagggtctgggtccagtaggctgggggaaaggcggtgaggagaggagtctgcatcacggccaggctggcagctctgaattcccccacctttcctccccaggatgctttggcccctggcccctttgcttcttttcccaatggctggactggaaagcagaagtctcccgatggtgtgcaccgcgtccgtgtggattttaaggtatggcattgagtggggcgagtcacagagcctctggttggaagaacctcgatgactgtgtcatcgagaagccaggtgggtctgccttgtatgcctggcggccctctgatcctgcatcctctcttcccccaggaggattgtgatttagagaacgtgtggctgatggggggcctgagtgtgctcacctctgtgccagggggccccccgatggtgtgcttgctgtgtgccagcaaaggactccacgaggttagatctctgcctttcttcacagacccccagctctctgtcggtcctcacggcctgattccttgggccctctcagctgggtctcatcccttggccctctggcctcatgctatgcccatcattcactcctttaccctgtccccagctggtgttctgtcaagtctgctgtgacccattccacccattctgcctggaggaggccgagcggcccctgccccagcatcacgacacctggtgctgccgtcgctgcaaattctgccacgtctgtggacgcaaaggtcgtggatccaaggtttgggcccaagggctggccagggtgggtggaggcctgaaggtgagggcatccctgtgccagcaggtttcgccatctctgtctccacatccaacagcacctcctggagtgcgagcgctgccgccatgcataccacccggcctgtctggggcccagctatccaacccgggccacgcgcaaacggcgccactgggtgagagatgaggttcacccacttgctttgtctctaatgaatatcaccaccacccccaaacttgctctaggctggggctctcaggaggagcagaggttggggatcctcttaagaattgattagtaatgtttcctcttcaaaaatttcacataggtcagatttatattcagaatttgcatggagtggttttaggggcttatgaatctcacattccgtgggctcagaatcccctgctatagcctgatgtcctctcctgccctcatgttcctcctccgtgtctgtcctgcgtgttttctcctcttacctgtccctccttgcctgcttcctgcatatccccaattcctcctcgcccgtctcccgctcatgttgctccagtccagtgcctggttttcccctaacatcgccctgctcccccagatctgttcagcctgtgtgcgctgtaagagctgtggggcaactccaggcaagaactgggacgtcgagtggtctggagattacagcctctgccccaggtgcacccagctatatgagaaaggtggggaccgggcaggggaactggatgctgggggccacaggggaatggccaggctcttttacaggctttagcacagaccctcttttctcatggctttccaccttgtagctatgggactatctcttcaactcagggaactcttccacaggagtccatccagtatgtaaaacagggacacatagctcctctgagggtggtgggagtggaaggcctgggaccccactgtcttggtgtctgaggtacttcctggaacctcacgtctccattgagcggtttggaagccttattcaggcagtacattagcaaggccctgtgttctgcagagtctgaaaagaggcctcatcctaaggccgagcacagtggctcacgcctgtaatcctaacactttggaaggctgaggcaggtggatcacctgaggtgaggagtttgagatcagcctggccaacatggtgaaaccccatctgtactacaaatacaaaaattagccgggcatgatggcgggcacctgtaatctcagctactcgggaggctgaggcaggagaatcgcttgaacccgggaggcggaggttgcagtgagcggagatcttgccactgcactctagcctgggtgacagagcaagacactgtctcaaaaaaaaaaaaaaaaaaaaagcctcatcctcaaggagcttttagggactagtaggggcccaaaacaggggcatagtggaggcagctaaggtactgctaatccttgaacagagacactcagggctgagtgggaactccagcacctctgactccttctcttccctttctctaggaaactactgcccgatctgtacacgctgctatgaagacaacgactatgagagcaagatgatgcagtgcgcacagtgcgatcactgggtgcatgccaagtgcgaggggctctcaggtgagtcagtggagcacctgggctgcagcctcaaccctgtggggacccctgcccccaccacaggccccaagaggactggtgggctaagggtccttgctggcctaggggctgctgggagccctcacatcctctgaaaccacttttccctttcccacttggctatcctagatgaagactacgagatcctttcaggactgccagactcggtgctgtacacctgcggaccgtgtgctggggcagcgcagccccgctggcgagaggccctgagcggggccctccaggggggcctgcgccaggtgctccagggcctgctgagctccaaggtggtgggcccactgctgctctgcacccaggtctggagggccctggaggcaggatgggccggggctaggcccacccccagccctgctaacttccccgctttgcagtgtgggccagatgggaagcaactgcacccaggaccctgcggcctgcaagctgtgagtcagcgcttcgaggatggccactacaagtctgtggtgagtggtacaccaggaggagcaggtgggtggcaggaggagagggctggaattgtgcagaggggactcagtctctgacaaacccccttacagcacagcttcatggaggacatggtgggcatcctcatgcggcactcggaggagggagagaccccggaccgccgggctggaggccagatgaaggggctcctgctgaaggtgagctcttccggggatgcttgtggggtgggggagtgggaccttcagaccctgcccctgccagctctcctggggaagctggctcttctcatcctgttaacccactccccagctgctagaatctgcgttcggctggttcgacgcccacgaccccaagtactggcgacggagtacccggctgccaaagtgagcaaggctgggtagcagaagggaagccggggagtgagggcaaggccagggcatgcaggggccacgctgggctgagaagagatgagcagaggtagggtctggagcagagctggagaggagggtggtggaacccaggtgagattccctggtggttctagactagcaaagctttgtttctgctttgtgcaggggaatgctggggacaaagcagtgagcgaatcagattgggctctgcttaaagagctcattgtggagccgggcaggcactgaagacccagatggtcagggcagtgatggagaataccagggggcggtgggggcccggaggggtacctgctggagccgaggtgtcagggaaggcttcctgaaagagatggcattggagcagagctggggaggaagagtattgcaggcatgaggagcagcatttcgtatgtccaagctggcacaagagggcctggcttatttggtggactgagagaaattccacatagagagggagtagcgggtgtcatggcgagttcaggctggtttgtggatgggcccccgttcagctgcccttgttgggcacatcagctgctaaccctgcctgtccacagcggagtccttcccaatgcggtgttgcccccatccctggatcatgtctatgcgcagtggagacagcaggaaccagagaccccagaatcagggcagcctccaggggatccctcagcaggtactgggaagtgggggtccagaagccagggccctgtgttggtggcctggctccgggtcctgattcttagacctcccttcacatttcctcttcagcattccagggcaaggatccggctgccttctcacacctggaggacccccgtcagtgtgcactctgcctcaaatacggggatgcagactccaaggtgagggctgctctgtgacgcaccaggttgtggggcctgttccctggcctccccacatcatgccactcctcttctgccccaggaggcggggcggctcttgtacatcgggcagaacgagtggacacacgtcaactgtgccatctggtcggcggaagtcttcgaggagaacgacggctccctcaagaatgtgcatgctgctgtggcccgagggaggcagatggtgagggcgcgggcgcagagaggtggacagctctctggctcttggggaggcctcctccggtgcaaacagctcttacttcacattccctacctggcatcctttcactgccaggctgaggtctcttggttgccctgggacgttggtgctgatggcagctttttcctatgtgggccctctggctgtaatctgggcctgaagtgtgggagtctaaaagtgagaagagtgcccattgattgaacctgggctgcacgctttccatgctgggtggcgttgagctctcactacatccccgtgaggttagaattcccccactcctcacagtggtgcctgggccaggtacagagagacctcaggcactctcgggcattggggtggtagagattcccactgcgggggtatctgtgaggatgaaaataacacaacctccgcctgaaaactgtgacaaagataatcacactaatgctatcagcaagtattgtcattcttgcttcaaagaaccagagagagtttggtgtgcacctgggcctggatgcggctggggagaggctgcgcctagggagagcctttgccgtgccaggctagacagggacccatgcagactcagtgacagtggtgcctggcgcccagccccagccctggcttctcccctgagctgccctcccctacgcagcgctgcgagctctgcctgaagcctggcgccacggtgggctgctgcctgtcctcctgcctcagcaacttccacttcatgtgtgcccgggccagctactgcatcttccaggatgacaagaaagtcttctgccagaaacacactgatctcctggatggcaaggtgggccagaactgtggggtacacggttccttccccacctctcttcctgttcacttagggacccccgtggcccccaggcctggccctactgcctctcagtgtctcctcatctgttttcccagaggcctttaggccaagcccctgactgttcagacttccctggcatccacctcccccaccaatgcagccacctcactttgccaccccctcttccaggaaattgtgaaccccgatggttttgatgttctccgccgagtctatgtggacttcgagggcatcaacttcaagcggaagttcttgacggggcttgaacccgatgccatcaacgtgctcattggtaagctgcctgctctccgccctgtcctcctaccctgtcctgcctgcctctcctgacctccgctttgcaccacaggttccatccgcattgactccctgggtactctgtctgatctctcggactgcgagggacggctcttccccattggctaccagtgagcggtcggggtgatccatggggccaggggactccatagctggatcccatttcccaagcatcctaaccgtcttatcccacatgccaggtgctcccgtctgtactggagcacagtggatgctcggaggcgctgctggtatcggtgccgaattctggagtatcggccatgggggccgagggaagagccagctcacctggaggctgcagaggagaaccagaccattgtgcacagccccgccccttcctcaggtgtggctttggctctgtcttcttcctgaataccgctctccctaaacaaacctacagatctctgttccccgctcccttttggaaagtccaggaggcttgcttttgcttcagttgctgtaatgtaacggcagctcgcttactgccatgccttgtgtgccaggggctgtgcccggcttttcatgggaagtgaggtggggagagcggcacgctgcctacttgaggtggggtactggcttttggacgactgcagggagtagagtgcttacagctccctaacttggggcactgtgctcatggagcgctctccagtgtcgccatactacaccttgaaggggacagtggctgaacacagtaacatgctagggaagctggaattggaactgcatctgctcagctcccaaaccggcccccttacagccacactggctgtgggatgtggctgagagctggatggcacagggcaaagaatgggcttggagatgggggagaggttattgtgggcagagcaggaggcagaagagatttggatggtaggaagggctttattccaggttggagcatgacaagaagtggacagaggaggagggtacacccatcccgtctggaaaccagggagttttgggtggaggagggagatcagtttgcagaggttgggtggagccaggtaatggagagcctccgggccggggcgggcgggagcgtctgatgtggcttggatgcaccaggcaagtaagaaagtggtaggactggccgtgctggagggagggcagttccccatggcgtgcaaagcctgcagcagaggcagagaggagatggcaaggagcgagtggggagaggccctgaaggccccctggcccaggtgtgtgcaggttttgccaactccacggtgggtttagcctgggtggtcactggaaactggggcctgttgtgactgggtcagggtcggggacctgggaggcatagtggctcaggatgagagcatgtgggcaggctttgacacagagcccctaccaccccaatgccatttctcgcctcttcagagcccccaggtggtgaggaccccccactggacacagatgttcttgtccctggagctcctgagcgccactcgcccattcagaacctggaccctccactgcggccagattcaggcagcgcccctcctccagccccccgttctttttcgggggctcgaatcaaagtgcccaactactcgccatcccggaggcccttggggggtgtctcctttggccccctgccctcccctggtgagcaccgggcatgtgggggttgggggtggagccgcggaggtgggagctgctggtaacaccaaccctccccccacaggaagtccatcttcactgacccaccacatccccacagtgggagacccggacttcccagctccccccagacgttcccgtcgtcccagccctttggctcccaggccgcctccatcacggtgggcctcccctcctctaaaaacctcccctcagctcagggtgccccctcctacctcagtcgtcacagccctcacacctacctcaggggagctggctccccctggcccggccccatctccaccaccccctgaagacctgggcccagacttcgaggacatggaggtggtgtcaggactgagtgctgctgacctggacttcgcggccagcctgctggggactgagcccttccaggaagagattgtagccgctggggccatggggagcagccacgggggcccgggggacagctccgaggaggagtccagccccacctcccgctacatccacttccctgtgactgtggtgtccgcccctggtctggcccccagcgctacccctggagccccccgcattgaacagctggacggcgtggacgacggcactgacagtgaggctgaggcggtgcagcagcctcggggccagggcacgcctccttcggggccaggagtagtccgggcaggggtccttggggctgcaggggacagggcccggcctcctgaggacctgccatcggaaattgtggattttgtgttgaagaacctagggggtcctggggatggaggtgctggccctagagaggagtcactccccccggcgcctcccctggctaatggcagccagccctcccaaggcctgaccgccagcccagctgaccccacccgcacatttgcctggctcccaggggccccaggggtccgggtgttaagccttggccctgcccctgagccccccaaacccgccacatccaaaatcatacttgtcaacaagctggggcaagtatttgtgaagatggctggggagggtgaacctgtcccacccccagtgaagcagccacctttgccccccaccatttcccccacggctcccacctcctggactctgcccccaggccccctcctcggcgtgctgcccgtggtcggagtggtccgccctgccccgcccccgccaccccctcccctgacgctggtgctgagcagtgggccagccagcccgccccgccaggccatccgcgtcaagagggtgtccactttctccggccggtccccgccagcacctcccccatacaaagccccccggctggatgaagatggagaggcctcagaggatacccctcaggttccagggcttggcagtggcgggtgagtgcgggtgctgaggctggcagagcaggcaagggggcagatgggcgggagatgcggctcatccttctcgggctcgccctcccaggtttagccgtgtgaggatgaaaacccccacagtgcgtggggtccttgacctggatcggcctggggagcccgctggggaagaaagtcctgggtgagtggccaggcccctctccctggagggtctgggacctctgtccttccccttcctgacaggtctcttctcgcaggcccctccaggaacggtcccctttgctgccacttccggaagatggtcctccccaggtccccgatggtcccccagacctgctgcttgagtcccagtggcaccactattcaggtagggaccggccttgccctctccctccttgcctgtgcctggctcagctgggtgactcacagatgcaaaatcagccctctttcaaaaccagtatctactcccaggggccaagcctgaggctcggtgctagagttagagatgaccttggggagcctctggccttgtgggagaaacagacatggaaatgacatttcgcctctacgtgggatccttttaagggtctttgtccagcatgcccaagagcctaggggagggcctcagagcctagcctgccaggagctgagagagagcttcctagagtagccaaaggtgaagttctaggatcatctagagggaatgcagcccagctagcaccgagatgagggtcagggacagtgggaagatcagaagagtggtgtcccagaggcccagggaagggagtcgtcacatctcagctgccacagagactgccaggcctgtggagtctagcgttggtgtccagtgagagcaggtggcacagggtggggcgttgtgtccaagtccagaattgagaccatggttgaagaaggcaaaacagcccaagcacttggccagagttcagctaaggatcgggagcgggaggtgggcgagcagcgtggaggtgcttggtgtgagggccaagacagcggagccatggatggcagggaagggcaggctgggatggaaaaggcagtgggaagaggcctggtggctggttttgaactggtgacctctgaggtaaaggagaggagggaaagcaggtgtttatgcagaaactgtaatacatggggtggaggcccctggaggaggcttggctgatggactccttgaagctggcggtggagtggtggagttttctgttggtccctgagggcagtggctgggggagtggctgcggccaggtaagctggtggtcgagcagcctgaggctgggattttgtggtggcccaatcctgtccagatgtttggattttctcatgacacacagctcagttgctgagctgggaagcagagtgacgtggattgagagtgcttaactcagaggctgcttatgtctcagagatgacatgagaatatggcagtggccttaggaggtccctgtcctcagggatcagaccacattttggtgcgggacacagacatgttagcaagggcaggttagagtgggcactgagaaaccgagcagtgagagcacctgccagggtcctgtggtcagtcctgctgtgtttgggaaactggaagtgagggttgggggacacagggaagaagttgacagaggtggactctggggcactgaggcctggagaagacgggagtcacacggcaggagtgttgctttagagtctcccttggggcaggggaggtggggcagggtggcctggagaggtgacatcgggagagtgtggccatgtgggttttgcctctcctaaagcctgttccactcaagcttttgtgcccccaacccccagtggtcagtccccagcccacacctgcttgagcagcagcagcgtttggtgcagcggatccctcccgccttgaagcattgtcttcccggcttccaaggctgctcctgctctcacctctggtcctgcctccttgctcacagctgtcaggctagatgtgtcccgggaccctggccttgacttctgtgtatgctcactcccaggggctcccttccagcttggtggctgtcctcccgtctgtgttctgattgtctccacattgctctctccagcctagaccctgtccctgaactgtggcctcctccatcctgtcctgctgcctgcccaccatctccaccagcaggttgcagggggaggtttctaagaggcctctcaaagtcagcctgtcccaaactgagccctccacctgcacgccaaacccattcttcttttgccttcgctgtctcagtccacagcagttttatccttccaggtgttcaagcccagcgttgtcccgacccccatcccccttcttcacatccacatctactacgtcagcatatcccgtctgccctgtttaatctattaaccctcgagaaatcccctaaatagctcataacatacagtgtact[136 bp omitted]atctgtactgaaaatacaaaaattagccgggcgtggtggtgggcgcctgtaatctcagctactcgggagactgaggcaggagaattgcctgaatctgagaggcacaggttgcagtgagccgagatcacaccattgcattccagcctgggagacagaacgagactttgtctcaaaaaatgataattttatgtttgtaacagttacagaaatttgctgcatctaaaaaaaatagatgtgcaaaatacaattctccagtattttaaattttgtgtgagaaacagaataatgacaggtagatgggatgtatggtacactgggtttgagtgagccataggcgtgtcctgaagagccaaaaggccccaagcctctgtggaatgcttttgtacccaagaagtcctgcagaagaggagccgcaggctccttaggggaagaaatgtccattctgcagggctcactgggtaactggagcagaaggagggccattagaccctagtatctgtgtctgcgcctaggggtggagagagtggtgtctgctgggagcacagcggggctcaggggcttttgagtccgggaagggtgatcttcactccaacctgcttcttgggaccaggtgaggcttcgagctctgaggaagagcctccatccccagatgataaagagaaccaggccccaaaacggactggcccacatctgcgcttcgagatcagcagtgaggatgggttcagcgttgaggcagagagcttggagggtgagtggggggagtgcagtggcaggagggagagtgtccataaaacaccatcctgactcagctctggctctgctgtctccccaggggcgtggagaactctgatcgagaaagtgcaagaggcccgagggcatgcccgactcagacatctctcctttagtggtaaggagtgggccccacagggggcagggagctggatgtctccccgagggcaccatgggccctccacatgacaggtgtgtcctcaacatctcccctcaggaatgagtggggcgagactcctgggcatccaccatgatgctgtcatcttcctggccgagcagctccccggagcccagcgttgccagcactataagttccgttaccaccagcagggagagggccaggaggagccgcccctgaatccccatggggctgctcgggcagaggtctatctccggtgagaggtctggggtgtgatgcctgggtcagggcgcccctatgagagctcttgagggtgggagttaactgtagaggttggaaactgaggcctggggaggagacactaggtcacttgaagagttatttctagagttagccaggctccgtggctcatgcctgtaatcccgccactttgggaggccgaggcaggaggatcgcatgagcccaggagttggagaccagcgtaggcaacatggcaaaaccccatctctaaaataaaaatttaaaaaagttatttctagagctgacatcagaaaaatgaaccccacccatttccctgttagctctgtcttcaacagtatattcctccttcccctgctgccacctgcaggaagtgcacctttgacatgttcaacttcctggcctcccagcaccgggtgctccctgagggggccacctgtgatgaggaagaggatgaggtgcagctcaggtcaaccaggtatggagtgtgagctggggggcgggtggtggtctggaagggtcttagagagtgagcaggggtgagagaggtcattctgagcaccagcctgggtgacactgctgtccctcaccagacgtgccaccagcctggagctgcccatggccatgcgttttcgtcaccttaagaagacgtccaaagaagctgtgggtgtctacaggtgagtggggttgggggggaggatgccccttgggtggacggacaggtgcactgggtagggggtactgtctggtttctgtccccctcccccctgagttccctgttcatcctgccctgcagatcagccatccacgggcgaggcctgttctgtaagcgcaacatcgacgcgggggagatggtcatcgagtactctggcattgtcatccgctcggtgttgactgacaagcgggagaagttctacgatgggaaggtgggctcccagtggctgtgggaagacagtgggtgaagcgagcctgtccgcggggacagagcacctgatctccccacctcatccctgcagggcatcgggtgctatatgttccgcatggatgactttgatgtagtggacgccacgatgcatggcaatgccgcccgcttcatcaaccactcctgtgagcccaactgcttctctcgggtcatccacgtggagggccagaaacacattgttatcttcgccctgcgccgcatcctgcgtggtgaggagctcacctacgactacaagttccccatcgaggatgccagcaacaagctgccctgcaactgtggcgccaagcgctgccgtcggttccttaactgaggccgtggctgcccaccacgacccctcacacctcctgctgccgtcgctgccatcttgcccctagcctgggggctccctagcccctcccagagcatctcacccccaccctcatgttcagggtggatgtgggcatgcaggtgacaagggccctgcctccacccctccagcccatccagcaatcgccccctttctgccctgggggcccaggatgtagatattgtacaaaggtttctaaatcccttcttttctatgcacttttttatttaagaggtggggtcccaggtgggaacccccccacaataaagtctgtcaatgtttggagaggtggtcttcccatttgtaggctgtgggggcaggtaggaaccccacttctacacacccacccatcatgacccaaggaagttcatcagcctcaacaggtaggtgaggccatcattcagaattagaagtcagtcatggggtctgttacggcttcagaacaacacaacacagcaactgtctgtagcagggttgtttcccagaggggattctggtggcccagaggcacctggggtcagccctcccacatgtggccctgtgtgtatgttggaataggcccttctagggcgaagagcagtgaggctatctgttgggtctttgcccaattaggattgtacttcaagaagtacttcagtgctaattgtatactgggcttagtagtcagcaaagttctttattgggtgttaagcccagcaaaccccagatgagccaagcttggacagcacccgcaatgcatctgcccgccctagctgggcgaggtgtgtgccaagctggcccagggaggcagagggctcccttgccaccaccatctcaatcagagcccgcagcggcgagcgactcggcctcagcgaataggcaaaggtggaccaggcagcaggcagcccatatcttgcggccaggtgtcgagtagtgccatgggccatacccccacctggcccaggctcagggtccagcagtacaatcagctcttccagcacctccagctcatccaggaggcgagacaggggttgtgacgccagactggacagttctggaagaaaggggaagggtaaaggtgcggaagagcgggcgtccagtccaccttccctgccccggggctcctccaggactaacccctgctcaggagtggaagtagtgaggcctccttccatgtgtcccctgtctccagggcgcctggggaggacagatgcgaggaggaaggggtgtgggtgttggggactccgcagaccaagccaggatagggataggggtcggctttctccttgggccagcagagatgccagagcagaataaacaggaggatcgctatcaccgccaaggtcaggagcaggaccagcaccacgagcggaaggaaattcggccaggcctgctgagggacaggctcaggggtcctccaggcaatggaacttgctggtgagctgcgctcctgggagctaggggcgcctgggtttccaggtgtgagggggcagtgccccttggcagggaccggcctctggggataaggggttggagtaaagctggaggccacactccactcctgcccgctcccaaacctcccaactttatatcctttaatggggccacatcccatctgatacggtatctgataaggtagttgggccccgcaaggcccaactaccttaacctaggacctcccgacccctgcaggccagccacctcctgaaaccacggccccaccccttacgtggggctacgccggctccctacatctaggccccccacctccagcacgcccttgccctgccgggagtcccatctgcacctctctgcagcgccacggggttctgcccccgcccgcggcgggagtaggggtcacggctccgccgccgcaggggctacatagctccgcgccgtcggggttgcactgcccagaagaacactttcggaacgggggcgttacgaaatcgccgtggtcattgagtccgcagttttcccggaactcatagtctagcgggaaagctgcgctccagtgcggccgcctagcccgcccctgcgcgggcaacgccctctcccttcgccctatcccagcgtgccccgcccctccaggacgcttccagcctattagcgtgcgccccggtcttgtcacttttctccgggctcgccttttcacccccctccagcctgctccgcacgaagctccgcccactcccggcttctctacataaagcccaccctttccacgcggcccctatcccgcctctccagccatatccattcgctgttgccctacggtagcccgcactatctgcacaggctctgcctgccatccctgtctgatctgcataaggcccaccgcttagacccctaagcaagcctctctggcccgtagcccacagacctcgccccttccccgctccctatcacctgcaagctccgcccaagcaaggctcggtctcggattctcacccgggcaggggggcggcccgaagcgttgcaggcagctgctgcagcacttgttgtctgggttccagtattcaaggcggccgcagtactgggaggcttccggcggtggcgccagggccagaagcaacaaggccgtcaggaggcatcgtccaggccccatctggggggccgtgatagcgggacttccaaacacagcgcctctgctacactttccggggaaatcgggcagaagaaaggacgcggtgatgtgggggaacagaattctcacgcctcttcggaagccgggaatctacccccgagccctcatcccccaactgagccggttatcagagaagcccacaaggccactaggggactaacagggctgcggatctagattgcaagaatgcatatcccacctctgccgtgtcctcacccacccaccctcccttttccatccctaaaataagacaatgatagcacctgtctcatagggttattgtggagaattagaaccgtcattagaagtaaagcaggggctgggtgtggtggctcatgcctgtaatcccaacactttgggaggccaagacaggaggatcacttgagcccaggagttcgagagatcagcctggacaacaaaatgaaaccccatctttacaaaaaaaaaaaaaaaaaaaaaaaacagcaaagcactttgccaagtgcagtggctcacgtctgtagtccctgctactagggaggccaaggtaggaggattgcttgagccatgaattacagaccagcctgggcaacacagcaagacctcatctctaaaaacaaaaaaaactggccgccgggcgcagtggctcatgcctgtaatcccaacactttgggaggcccaggtgggtggatcacctgaggtcagtagttcaaaaccagcctggcctacatggtgaaaccctgtctctattaaaaatacaaaattagccgggcgtggtagcgcatgcctgtaaatcccagctacttgggaggctgaggcagaattgcttgaacctgggaagtggaggctgcagtgagctgagatcgtgccattgcactccagcctgggcaacaggaatgaaactccttaaaaaaaacaaaaacaaactaaagtgctgaaaacagcacctcacatacagtaaactcagtgtttaagtgtaaggcattactaactcccatcacaattcggcaggcacggaggagtcagccccatactggctggagaccacctcccagcacctcacctcacctttgaatcctaatctccttggggctagggctcctcccacctgccacaaccaggtctctcccccttgaataagcctcagatggaggtgctaaggttttcagcacaaaggtgtccccaccctaccagtaccgttagggtcctgggtcccaagctggccgtgccaagttcctcagctgaagttgtggccaggacccagtcttgtttccccttttcgtcacatgtgtgggtggagggaaatgccaaaccacagcaaaagcaagttgatgccgaagtgaaacacgcagctttattaagacaggggcggtagaagaaggtctccatgctgaacagattacattatggagcccgggagcctgggaaggatggggcaggagagtgaagggggctttgaggagaggtcctgccaggaacatctgtccctgttgggggtgaagggtaagggggccagggcctcagaagcggccatgccagtgatcaggggaacaccgatggttcctctctcggggatggtggccagtatggaacctcgggggtgacctgggaataggagcgttgagagttctgttagaaccctgaggagtggtgcagagatcctgcaggcctgcctctctgctctgggatgaggcaggagggtgctgaaataactagagttctaagacacgacctcagtggccagtatcaggggaactcagtggccagtatcaggggtggcaatccaggctggtcgtggattaggggttcaggctggtttggggattgggacttaggtactggtctccagatggagctcagaactactcttagggtataagagtcttgggaatgaccgggcgcagtggttcacgcctgtaatccccacactttgggaggccgagatgggtggattacctgaggtccggagttcgagaccaggctggccaacgtggtgaaaccccatctctactaaaaatacaaaaattagccaggcatggtggcaggtgcctataatcccagctacttgggaggctgagaaaggagaattgcttgaacctgggaggcagaggttgcactgagccaagactgcgcctttgcactccagcctgcggaagaagagcaaaactcc[136 bp omitted]tggtgaaaccccatctctactaaaaacacaaaaattagccgggcatggtggcaggtgcctgtaatcccagctatttgggaggctgaggcagagaattgcttgaacccgggaggcggaagttgccatgaaccaagatggtgccaatgcactccagcctgggcaacagagtgaggctccatctcaaaaaaaaaaaaaaaaaaaaaagattcttgggaacgtggttactggggcttagggttaggctcatctgaggatataggggccttaggacatgaggagacatagcaggctggtcctgaggtacctgcgcctgggtccccgcccatagagctgcctctggaggttctgggaaatgggccgcagatgcatgaagttgcagaagccacctcgggtacattccctgcatagagggtagagagatggaggaagccattgtcactgacagcccctaccacgcattcaaagtctgggattccaagtgcccatcccacccttgaactaccataccccatctcatactggcgacagcatgactcccggaagtcagtgacaggagacagctcaccgtgcacagcctgcccgttgaaccagcggttactgagttcagccacggcccgctctccatcctcctccctccggaactgcaggaaatgtcagtcagggtcagcaggagaactcagagatcttcaggggactcactacccgctctggggctggactggatttagtgatgaaattcaagctgagagcctacagtggccaccatcaggcattgaaacgcctccacttctgggccctaagtggggggcagcaagcaccttgacatagacgttgcccacgaggtggtccccaaggttgtcgcacacattcatctcttcaatctccccatacttctcctgcagttctgtgaacacctcctgtggaagacggggaggaactcagctgagctcccacaagaaaccccatctgcccctaccaaccctcacctcgaagaagctatcatagtgctcctgcacctccacgtcactcacatgacctggggtgggggcgggcagggtggaatcagagtgtagcctactgggggctgttcaccttgcccccaggcctggtcccttactcacagtgtgatccgtctgcagtttgggctgtgttctgtggattccggtacaggttgagcagcactatggtctgcacagaatttaaaaggggcggggcctgagctcagagggcagggctgcatgaacagagagtgaggcatgaaggttgggggtggaaccttacaccccagcctaagcatcatgagtgcatcggcgatcctttgcccctaagaaaccagaaaagggatggaggggactggcaaggatgaacagcgggatggaagggactggcaaagatgaacagccgccgtgtgtagcctgtacgcatgggggcgcgaccaagttcccgggaaaacggcacgaagaccggtgggaggagcctgcagaaaggtccaatgagaaaaaaagccgggcggtggggagggactcaggaacccggaataggcgggacatggtgacgacggccccagaaggggaagggccagggagccgttaacccccgaggctccgtgccgggtctcacctggctgaatgtcggcttgttgtgaagccgggagcaccggtccccgtgccggcagaccccgatcttaaagtaaaaagagcagttaaccctggaaaaggtgcaaagacaaaggtgaaccgagggccggggaagctgggcaccccagaaacaccgccccaccacccaggaccccagtaccccggccccgaccccccgagagtccactcccagcgcccgttctcacttgtccttctcagtcccgaatatcgaagctaaatattcagccatttttacccaagccctccaggtctggctgctcttacgtcacttccgttgcttaggagcactgggaagtgtagttcgttgccctctccaggcgcttaccaagcgctcggaaacgccccagggcgcttgcgcgtgggaggcgcgcgccctccccatagactccccggtaggagttcttttaacagcgcatgcgtgcagtgttgcctcgcccaaagaagactacaatctccagggaaacctggggcgtctcgcgcaaacgtccataactgaaagtagctaaggcaccccagccggaggaagtgagctctcctggtgagttgggggtcgtttcgcccaccctagtaaatataaagagctctttaatccagccagcttactagtgggggtggggatgccctgctttcagcaaaccgacctttacatttatctctgatttgttctaataggggcgtggttgttcgtgatccttgcatctgttacttagggtcaaggcttgggtcttgccccgcagacccttgggacgacccggccccagcgcagctatgaacctggagcgagtgtccaatgaggagaaattgaacctgtgccggaagtactacctgggtaaggcagatcgctagggtcccaggagaagagaggggactggactagagcacccgagggaagagggcctcggggcctggattcttaagtctaagagatgaaggacctgcgaacgccgactcctggatttgagtggggagggcctgggtcctgaggaatgaggaagctggggcctcaatttctggatcccaagagaggagggggattgagggcctggactcttgggtcctgtgaaagagatggttgaggaatcagattcctggatcccaaagaggagccagattcctgagtccctgacaacagaaatctccatttgaacttgggtgtgggagagtttcttccaaatagatctcggtgggagttggagaagatcttcattgccttatgaggttttggggtttgtttgtttgtttttctttctccctaggggggtttgctttcctgccttttctctggttggtcaacatcttctggttcttccgagaggccttccttgtcccagcctacacagaacagagccaaatcaaaggctgtgagtctagagcacagaggagggaggccagtggcaggggagagggggaagcggggaatcttggtgggaagggacaatggaggatccaaaatgttggggctctgggtgagaagggaaggctggtctagggaagtctggagagcagccggaggccaacccttccagcttctgtttcccatgacagatgtctggcgctcagctgtgggcttcctcttctgggtgatagtgctcacctcctggatcaccatcttccagatctaccggccccgctggggtgcccttggggactacctctccttcaccatacccctgggcaccccctgacaacttctgcacatactggggccctgcttattctcccaggacaggctccttaaagcagaggagcctgtcctgggagccccttctcaaactcctaagacttgttttcatgtcccacgttctctgctgacatcccccaataaaggaccctaactttcgatactgacttcctgggatcttttagaggttgaggcataaatgattattaatatttaaaaacatctgttgagagctttgtacgaggcttagtatttagacatgatgtacattttttacagtgcatactactcataatcttctgaactaggaactttcctgctcaggaaactattagatgagaaactaagaaaggaatagtgcttccatttctttttcttttttcttttttttttttttttttgagacagagtcttgctctgtcagccaggctggagtgcagtggtaggatcggcctagtgcttccatttctaggggctgttatcctgtactggtagtcgtgaattcaaaaatataactttcctactgtgggctgcagtattctcatcagaagtgtagatcacgatgctacttcctgggatttatctggaccaagacgtgtgacaaatggaagtttcccgttttctgaaggaagtgttgtctgcaaaaataaaaatagtcaagagctttctcagagaatccttccttgaccatccatcttatttaaaattcaatcaccaccttgatattcctatgtccctttcaggctacactttttttgtgggttttttttttggggggggagaggggtttgttgttgttgtctgtttgtttttctagatggagtcttgctctgtcacccaggctggagtgcagaggtccgatctcggctcactgcaacctccgcctcccgggttcaagcgattctcctgcctcaaactctcgaatagctgggattacaggcgcatgccaccatgcccggctaatttttgtatttttagtaaagactgggtttcaccatgttggccaggctggtctcgaactcctggtcacaggtgatctgcctgcctaggcctcccaaagagctgggatttacaggcgtgagccaccatgccccgcccagatcatattctttctcctattacatttcacttaaaatttacttgtttactgtttatcttccctcctttaaaagataagctccattagcgcagggatttttgtctattctgttcctcaaggtgtctccaatgcctagaagagtgcccgacacactaataaatatttgcaaaatgaatgaagttgtacctgcaaagagattaacagatacctggcacctagcgagtgctcagtgagagggaacccaacgttattttacattagtcttcctcttagggatgaagggaccccaacggttggttaaatccggtaaagagctaacttggtgttgctcaacccttctcacactacaagtcccgggaagcctcgcgatgccctaatcctttgtttcccaccgtgccccgcgcggcgcaggcgctgttactcagggtgagtctgggaagctggaactacacctcccaggaagctagggggtagatggtttgtttccggaagcaaagccccaggtgggtgggacctaaagctgggagactacggaggcagctctcaattggtcaggatgcgagattgacggctgcaataactaataggaacaagctactgccgaaggggcccgcccacagaagggtggtggccacggtccaggctggacacaaccaaaggcggaggacccgtggcccacgaagctcatctttgaactgtccccgccttctcccgccttgacttgtgaccctaggccctttggggcgcctctgacccagctagccagatcccggacccaaaccatgttccctgtgaaggtgaaagtggagaaatcaggtgaggaccctgacgtcgggggcctgtcgggaccatcgggttgacagggtgtggagtcccggtggaagggagtatcgcggaaaggggactgcacgacttttccctgaagcccacctgacaatcgctgtatcaggcagcgagcgttgcctgccaccttcacaccctcccggtgtgcgcttgaagtcgctttgagattgaatggggtggctcgggcaatgacgtgcgtggtaggacatggggaatcctgagccggtaactctgagaagggcccttttctttcctcttttttttaatttaaatttttaaaatatttaaatagagacggagtatcgctatattgcccaggctggtctcgaactcctggtctcaagcgatcctcccgccttagcctcccaaagtgctgagattacaggcgtgagtccccgcgcccagccgagaagttctcttttcttggcttcccctcagtttccccatttccagcagtgatcagagtcacacatcttgctgtgagcctgaagtacaggcactcttaatcctcacagtcactatattccagtaatcctagaaaataggaactgtggtcaatgggtgaagcttagaaagaggagagaattttgggttggggcggagctgaccggatcccaggcctggcatggtaagggcagtgggaggggtgcagaatttagacagaaagataatagtaaaatgatgtaggatgtcccatggcaaaagtgttattaaaacaaagtgggaggctgggtgcggtggctcacacctgtaatcccaacactttgggaggccgaggctggcagatcacttgaggtcaggagtttgagaccagcctgggcaacatagcgaaacgctgtctctataaaaaatacaaaaaaaaaaaaaaaattagccaggtgtggtggcacaagcctgtagtcccagctactcaggaggctgaggcaggaggatcgctggagccggggaggcggaggttgcagtgagctgagatcacaccactgcactccagcctgggtgatagattgagaccctgtctcaaaaaaaaaaaaaaagaaaggaaaagaaaagaaagaaagaaaagagaagtgggtgtgaccacaaatgatggtgagggaaggtgtacacctgtgagtgccaggctgaggagtgcagactccacccctgggtgctgtggagtcatggaagtttccaagcaagggaagatcagggtcaggtttgttatttttcaggaagattcccctggctgccttgtggagggtgtatcagaagggggacactgaggcagggagccaagggggagcaaaggacaggaccaggatgggtagagtagggaggaggtgggtgggagagacactcgggaggcctagtggacaggccatggggttggtgggctgggtaggggagggagaggggtatccatggtgaggtacagggagggacttggggacagtgaggcgacccttgagagggaggcttcaggcccaagtcgggggttcaggagagaggctgggcctgaggagagttgtggacgtgatccgtaccctctgcatctgcccaaggctttgctgcaatctcagctactcccttccccaccctcactctgtctctcctctgagctatgtttgaatccctgtgtctcctgggcttctcaggaagtccctggactggtcaggcaagttcccaggtgtcccctccaggctctgagcactagagccagagctcccaccagtcagaaaggcagagcaaacacctctcaaaggtaggaggacagcgtaacatcatcacttcctcaagttctgtgatgacgggaggcagccacaggctaactgggcaggaaggtgggcctagatctcatttcccgagggggaaaaaaaagcccaaacaggatgttttaggtgaaatctcccaattttggctgggtgcggtggcttctgcctgtaatccagcactttgggaggctgaggcaggtggatcatgaggtcaggagtttgagatcagcctggtcaatatggtgaaaccctgtctgtactaaaaatagaaaaaattagttgaccatggtggcacgcgcctgtagtcccagttctttgggaggctgaggcaggagaatcacttgtactcaggaggcagaggttgcagtgagccgagatcacgccactgcactccagcctgggagacagagcaagactccgtctcaaaaaaaagaaaagaaagaaatctcccaatttttaaatgtcagctcattcagattgaattcagatttaaaattataccactgttggccgggcatggtggctcacgcctgtaagcactttgggagcctgaggccagcagatcactgaggtcaggagtttgagaccagcctggtcaacgtggtaagaccccatctctactaaaaatacaaaaattagccaggcgtggtggcgggcgcctgtaatcccagctatttgggaggctgaggcaggagaatcacttgaacctgggaggtggaggttgcagtgagccaagattatgccactgcattccagcctgggtgacagagcaagactccgtctcacaaaacagaaatacattaattaattaaaataaaattataccactgcctcaaccagattctgcactcaggttgagcctctgtctcataacttcagctttggaaccagacagcctgggttcaaatcatcagctctgcaatttctttgctgtgtgcctttgagcacgtggcctaacatctctgtgcctcagtttcatcatctttaaaataggaataaaaatcatatctatctgagctgggctctatggcatgtgcctatagccccagctacttgggaggctgagacagcaggaccgcttgagcccaggagttcaaaaccggacaacatcgtgatatcctttttcaagaaaaaaaaaaatcacatctacctctaagggttattgtgataattcagtgggttattatttgtaatatatagcatatttaaaccttgccactgggacaggcacagtggctcacacctgtaatcccagcactttgggaagccgagatggctcacctgaatctaggagttcaagaccagcttggtcaatatcattaagactccatctctatacaatttttttgtaataaatttatattatattaaaacacatttttttaaaacccaaaaggctcataaggtaaggtgattggccttacctcctgtcacagagcaatcacgtgggacagctctggaactcagagctctgggcatcactccagccatctctgcctgttgcaccctttcaggctgcctgggcctggctctgagattggccagggcagaggacacgcacgcccttccctggcccagtcagctgcccacctagctggggcctgggagctgactcctgctgggtcctctcttgccccagagctggagatggccaaagcccggaaccaactggatgctgtcttgcagtgtctgctggagaagagtcacatggacaggtaggccagcgtggggtcacagggccgggcaccctggtgggttgggccctctgatcctgggtggattgggtgggaccccacaggctgacttggggaggaaggtgcttaatggggaggctgctcggtgccttccttctctggggccctggaaccctgagctgagagatctcttctgcctctagggagcgtctggatgaggaagctgggaaaacaccctcagacacccacaataagtgagtttttctgattggatttggagttgagagttcgtggttggtaacttctttccttatccaagccctgaccgctcagcccagcgctacctccatcgtggcccggaccactccacctgtacaaagaccctgtggcaggagaagcttaggtccccccgtggttgccacctagacccccatgggtatgggtgggacaaaaggcccaagaggcaagtggggttcatgtgagcatctcaggtttgataccagtatccccagggtgccctctgcagggttttgcacaggcgtttgtctgagggtcaactgtctttccccacagggactgctccatcgcagccactggcaaaaggtaaggtggcagggtcccagccagctgactagaggctcccagctcctaccccagtcctgacactccctctccctacgcaggccatctgcccgcttcccccaccagcggaggaagaagaggagggagatggatgatgggctggctgagggagggccgcagcgatccagtgagtagacagtggccctagagggtcggtaaggagccaagggcctatgcaaggatgctcacacacctcccatccccaccttcccagacacatatgtgatcaagctgttcgaccggagcgtggacttggcccagttcagcgagaacacgccactgtacccaatctgccgcgcctggatgcgcaacagcccctctgtgcgcgagcgtgaatgctctcccagctcacccctgcccccgctgcctgaggatgaggaggtgggatgggtagtgggtcccagcccagcagcctggtgccagggcagtgggtggataggctcaaaggatcctgcccctaagctagtgggatagacagacacaggtccctcacgtgaatcctggatcaggctaggcacacagatgtgcactcttaggttggggtgtggatcagagtccctagggaagacatacgtaaccacctggcctgggagacagggaacagggttaccctggacagttagatgtggacctccaagatcaggggttcccaagagccgaggggctagacaagggtccttagtacagacagaagtggccaccaggccttgaggagcaggggctgggcaggaatggatgggagtctataagccatctgacccagcggggtagacaagggtccccaggacagacatataggacccttcagacatataggactgtcagaaatggacagagcttcctaggtggcacagacgtgaccccctagacaggattccctgaggcaggcagacgcgactccctgggctgacaggtgtagatggagtctctgggctggataggagaagacaggggtccctggggcaggcacacttgacccgctggctggttgaggtgtctgcccttcatacatgcctcctgtctgagtcccttagcgagcccctcatgccatttgttgctgggaaaggcaggagggatgaatgtggattcccagcccctctgctttgactctcttgggcctggcatggggcccttgtgtccccagggctcagaggtaaccaacagcaagagtcgtgatgtgtacaagctgccgccacccacacccccggggccacccggagatgcctgcagatcccgcatcccatctccactgcagcctgagatgcagggcacccctgacgatgaggtgagtatgccaggctggcccagggttatggggcacatgcggtagggctcaggaatggccactcaacctggcctgtctgtccatgcagccctctgagcccgagccctcaccctccacactcatctatcgcaacatgcagcgctggaaacgcatccgccagaggtgagcgtcccccagcctgcttgcccctcgtagggccctttgcaactgctgagtctcccctctgcctccccaggtggaaggaggcctctcatcggaaccagcttcgttactcagaaagcatgaagatcctacgagagatgtacgaacgacagtgatgttcccaggtccccccacaccagtaaacatcccccagctccacactggtgtctgctccggtccctccttcctggcccaggcacaaagcagttggcagagctctagcacatttattgggagagtaagcctgggaaagactaagggagtggtggcagggagaaaggctgtggggaatcagagcgggtgctcagttgggtcttgaaggagaagaggaggagggtgggaggtgggttgccgaggatatctggttgaagacttgggggtcaagacaaagggacttagggggatggggtctggttagagttggggagggggcctaggacatccgtgcagagtctggggaggttggggtgggagagtctgtacagtttggtgttgggtgttctagttggcctggtgtccaagagttggggcagtcgaaaaagggttccagagtctggtgtggctggctggggtttcacggcagaaaatgggctggagggggcagttgtagactgtctggttgcaggggaaggatcgggtcttgggaaccaggcctggatggtctggagtgggaggtctgtgcagtccaggacgtttggggggtggggggattgtgcctgactggcctggggttgggggagggctgtctacaccataatttggtgtcaaaatagggaagggatggaaatgtagtacccggatgtctttgtagaggactcagaaggaagtagaggaggggtcttaagtggggctatatgccaagaaagtgggtcggtggggctgagactgtcggctgagggttagggtagtgctggtagggtctggaagccggggagttgtcggtgtggggtcggaaagctggagggggtgtgagagcgagggtgtcagtggaagggtctatgttatcaaggcagtgtccaggatggaggtcagggcagaatccaggagtgggtgagaggacagtccttggcgcactcgggacatctggctgggcggagtcagatcggctttaatagagggagcctgaggaggctcccggggtgcgggcgcggcccagccccctcctacttggctgcggctggcggtggggcctgggccgacgctggtgcggcctggatggacaggacgccctcgggggacagcgcggacgtcacggcagccggatccacgccaggcggcaggcggtagcgacggtggaactcgcgcgcgacgaatccgtgctcatcctggaggggagggaggcttgagcggccccgcccctccggcccggcggcgagcgtacccgctccagccccgccccacgccgcggctcaccgggcgctcctcgtggcgcgcgtgcacctccacgtgttcgcccaccaccttgacagcaatttcctccggcgagaagtgcttcacgtctagcagcaccgaaaagtggccggggtccgtcggcacctgagcgcagcgggcgcgggcgggactgtcattgggctgggccaggctccaggacccacccagggagaccccacccccgtcggttccgtgccgcggctcactctggcctccggagttgagcagtcagctctcctactgggagtcacccaggacctcttcaccctgaacaacagggatacgccctccccctgtaatatctgggattgccctctcccccgcagtgatgaggctcccttcccctgcaaggtcaggaacctctgccctcccccggtgtcagcgaatccgaagtcatcgtgccccccagggcactgattccccagctccctcctcagagccccgggtcccttctccgccagccccgccaaactcgccaagatgcccctttccccgtctccagggtcctctgcctactctcccactcgagtcacgggacctcggcagctactggtagccttcccccacttcagagtggccgggaacccttcctcaagtcgcagggccctctcccctcctcttctggagatatcgggccaccgcacacagtctctcaactcttccccgagactaagaacattccttcccctcaggagtcactgcccgcctccttttccccagatttcccggatcaccagcctccttcagagtaagcaagactccccttagagtgacccaggccttccattctctggagagctgagagccccccaccccgccccccacctaagagcgacggggacctcccacccgctgcagtgtgcgggcctcagattcccattgactccggaagcccttcggagctgcggactctccaccccgcccaaggccaacgaacattctctcacatgttcccaccccaggctgccccagacccctggcaatggaagtggtcgagttcacccctccccaggcctggcacctgggcgacgggcagcgccacgctgggtgcgcgcaggtagtagggggcgagcgtggtggggcagagcgcagccagctcggcctccagcagcccctcgccgaagcgctggtcaaagaggcgtccgggcgccgaaagtccgggcaacggggccgaggcgcggcgcagccaagacggctgcacaggcacagggatctccatcctgctcctccgcgttgcagtgcccctgcgtgcgcagccgctcatttatagtgcgccctgtgccggcccctcggagggctgcccagggacactgggaccgtggccagacccggccattaggagagccttatttagaaacccaaacaatgacttggccatttattaagcgcctgctggatgcctggcaaatgctgtcaagaaggtgacatgaagattccccaatttccagaagaggaaactaaggctgaggagggggagccttgcgggtgtggggagcacagcgtggtgattggggcccaggacccaagaggcccacggaagagtttccagtccctttaatccactgcctcccccctggcagctctgaggatgacgcagatggaggtctttaggagcagattcctggagaatgcggtagccccgccaggatgtcaggaggacatagaacaggccctccctacccttatcctcagccagaccttgggcccagtcccccggcaggccgggcctaattctgtgcctctgactcagcctctggtgcgcagaggccagggggcgcgagcatgaacagttcaggctggccccccgggggccgcgcgctggggctggaaatagctcattttgatcccgctacctcggccaggagcccagacctggcaactgatgcaaccagctgctcctgcagcaagaaagaagttagatgaccgttgggacggactgattggcccaactgatggaggaatagcggttagagagagggcagagcgcgccccccccccaacccgccccactgcccctgcaacagaaagaatggtagttagaccggggtcgggacaggacttctgcagcaagaaggcgcttaaaaagcgggacttttaagcgagggtactttagatcacctcctaaccgcaagcccagcctcagatccttcccattggtgcacggtcttgccaattactgctacactcggcaggttctccaatcaaacacgccctgtcgggcaggcagtcgtcccagccaatcctgaaacacctccctccgggtacttctgtttcctctctttcattggtcgccttggaggccgctcgcctccggcgcgggcacagagaggggcggggctgatagggcgttgctaagcgacggagatgcgcgcggggcctgttgggtgaaggagcagagcggccggaagcgcggagggagccgcgggatggaccgcaggtgaggccgatcgctcttccagggactacaggaggctggggaggaccaacggcgagagcagcacagcctaggacgggctggatacggtctggagtcgctagggctccaccgcactggaactacaattcccaacatgctccacagccgttggcctctccagccgtagccgttagcatcccgggggtcccctaagagtcttatgttcctctctgagtgggccccaaggaattattgcctctaaaggtgtccaagaaaggcttgagatctgaatttcttcattttgaaatggcccccagacacgcctgggcgttgtctttgaactttctcgcggaggcggagcccagtggatcctggggcttgtagtccatctaccctttgccttcgtgtcccccaggaatgtatgggaaatgctcggtgatataatccagccgcggttctttctttctttctttttttttaagacagagtctctcgctctgttggcccagactggagtgcagtggcacaatcttggctactgcaacctctgcccccgggttaaagcaattctcatgcctcagcctcccaggtagctgggactacaggcacctgccaccgcgcctggctaattttttatatttttagtagagacggggtttcgccatgttagta[134 bp omitted]gggacgctgcggaaaagacacggaggcccagccccactaatagatattctgattctgttggtctggaatgggaaccgcgcgcctgtaacgttgaaaagcccctcctagactggatccagggttgagaaccaccggctgtcagttcctgagttgctccctgttaagactgctccaggggcgggctcccaggactcacccttccactgtcgatatcctgaatgtgcaacggtgcttcatggaaatgacagtccgtctcctccaggaatctatgggaattgtctggttctgccctcctctaatgtccccctccccagggctgcggcgaaaccacgtgctgcctgaaccccactttcctcttgcagcctgccagttttctccattcaagatagtccctttggagatgcgcccctgggtcgaagccactactggccatcccagagccagacctggtgtcccaaggtgaggacacccctcaaagagtgctgagtgccagcccagtagcaagagaatgacctttagagggtaggaagacatgtgatgagagatagggatgagagatttaagagacagccccttgtcccctccccacggccctgcccttgtccccctctctaccacctggattccccatctgagcccccatcacactaggttgttatcattacaggatgtgtttcctcccctctggactgagactttgtgtgtgtcctggttcccctgcagggatgacccatgagacctcacactttttcttcttgtgctcttccctgatcttagaccctgagcccatccaggtctcagagatccaggctcccacaagctcccaaggctctagccacaggtcccaactcccctgagctgtttgaggagtcctggccatccagttcagggaccccctccctgcccagcaccactgagggacagatgtgggcctccccagcacccaccctgattgacagcggggactccgtggtggccaagtaagtaccagcagccctgggggaaaaagaggctttgggttagagggagggagaaggcatgcagtaataatcatcatggccagagctgtttctgcagcactcttttaggaccaggcagtttatgtgtgttaagaactctggtgctagactgcctgagttcaaatcccagctctgtcatttaactctctgtatgatcttggcctcagtttctttatctctttttatttatttatttatttgtttagagacagggtctcgctctgttactcaggctggaggtcagtggtacaatcacagctcactataacctcaaactcctgggctcaagccgtcctcccacctcagcctcctgagttgctgggattacgatgcatgccaccacacccagcaaacctcccaccttggcctccaaaaagtgctgtgattacaggccagacgtaccatgcccagcctcagtttatttatctctaaattgggtgttttgttttgttttgtttttgtttttgtttttttgatggagtttcactcttgttgcccaagttggaatgcagtggcatgatctcggcttactgcaacctctcccttctgggttcaagtgattctcctgcctcagcctcccaagtagctgggattacaggtgcccaccaccacacctggttaattttgtgtatttttagtagagatggggtttcaccatgttggccaggctggtctcaaactcctgacctcaggtgatccacctgcctcagcctcccaaagttctgggattacaggtgtgagccactgccaggcctaaattgggcatattaatagtacacatcccctagggctgttttgagctttcagtgagttactatatataatgatctctagcagtgcttctcacatagtcaccacttagatttgtagaatacaggttcagctgctgtaacaaagagtcccaaattaattatggctgaaacaagatagaatttattcctccctcacctgcagtccaggcagaagccaccagggatgatgtggcaacccgtagttgaggtgtcagggacacaggttacttctgtcttgttgctgtccgaactctaggccgttgccctttccttcatggtgcaaaatggctttcaaccacatcagctttccaaaatcacatttcataccctgtttgtcaagaacttagtcacgtggtcacaaggctacaagggtacctggtaaatatagtccataggagactggctgtgtgcccagctaaaagttacattcctggctgggcacagtgactcattcctgtaatcccagcactttgggaagccaaagtggcaggatcccttaagcccaggagttcctgaccagcctgggcaacatggcaagaccccgtttctactaaaaatacaaaaattggcagggctgcagtggctcacgcctgtaattccagcactttgggaggccaaagtgggtggatcacctgagatcaggagtttgagaccagcctgaccaacatggtgaaactccgtctctaccaaattagccgggcgtggtggtgcatgcctgtaatcccagtgacttgggaggctgaggcagaagaatcacttgaaccaggaggcagaggttgcagtgagccaagatcacgccattgcactctaacctgggcaacaagagcaaaactccgtctcaaaaaataaactaattaattacaaataaataaataaataaaaatacaaaaagtagccgagtgtggtggcatgcacctgtgtcccagctacccaggaggctgaggagagaggatttcttgagcccaggagttgggggctgcagtgagctatgattgcaccactgccctccagcctgggtgacagagcgagaccctgtctcaaaaacagttatgtgactatataagaaagaaaagcagatattgagggatagctaccaggctctgccatggtgcttggtaaacgttggctgctataattattcttattattatttggctctcctcactccactcacctcctatcccctgatgttcacaggtatataaacaggttccgccaggctcagcccaccagtcgagaggagcgccagcctgcaggcccaaccccagctgacttttggtggctgcagtctgactctccagaccccagcagtcaaagtgcagcaggtacctctttcagtgccatccactactcccacccctaaacctttgctgatcaatgcccccagcagccactcctcctggccctcatacctcaactggggcttctcagcaggagccaacaaaccagaaggaagaccccatacagctgtccctactgcggtcaacgtgaccagtgcatcccatgctgtggctccccttcaggaaataaagcaggtgacatccccattcactccctcccttgggtgcctgaactgacaacaccagccctaggacagaattagaagatcaggagcagtggctcacacctgtaatcccagcactttgggaggccaaggtgagaggactgcttgaggccaggagttcaagaccagcttgggtgacatggtgagattctgcctctactaaaaaaaaaaaaaaaaagagagagagagagagaaccaggtgtggtggtatgtacctgtaatcccagctacttgagagcctgaggctggaggatggcttgagcctaggagttcaaggctgctgtgagctatgatcatgccactgcactccagcctgggcagtagagcaagaccctgtctctatttaaaaaaaaaaaaaaaaaaaaagcctgggcaccgtggctcatgcctataatcccagcactttggtaggctgaggcaggcagatcacgaggtcaggagttcaggaccagcctgaccaacatggtgaaaccccgtctctactaaaaatacaaaaattagccgggcgtggtggtacacacctgtaatcccagctactcaggagcctgaggcaggagaattgcttgaacccgggagacggaggttgcagtgagccaagatagcgccagcgcactccagcctggcgacagcaagactccatctcaaaaaaaaaaaaaaaagaattagagctgatccccatttcaaggaagctaaaacagaaaaggaggatttgctggctaatgtaattgagaaatccaaaagtagatgtttccagatatgcctggatccaggtgtttgaataatgttgggagagacccaactctctctgggctccatgcccccccttttttttttgatacagagtcttgctctgtcacccaggctggggtacagtggcgccatctcagctcactgcaacctccgcctctcggggtcaagcaattcttctgcctcagcctcctgagtagctgggactacaggtgcatgccaccacacccagctaatttttttgtatttttttagtagagatgggatttcaccgtgttgcccaggcttgtctcgaactcctgacctccggcaatccgcccacctcagcctcccaaagtgctaggattataggcgtgaaccaccaagcccggccttttttttttttttttgagacggagtcttgtgctgtcatccaggctggagtgcagtggcgcgatctcggctcactgcaaaccccgcctcccaggttcacgccattctcctgcctcagcctcccgagtagctgggactacaggtgcctgccaccacgcccggctaatttttttttgtatttttagtagagatggggtttcaccatgttagccaggatggtctccatctcctgaccttgtgatccacccacctcggcctcccaaagtgctaggattacaggcatgagccaccgcgcccggccttctttttttttttttttaattagatagggtcttactcttaggctggagtgcagtggcacaatcatggctcactgcagccttgaactctttgcaaccttcgcctcctgagtacctgggactacagcatgcgccaccatgcccagctaattttttggtttttttgtagagatgggatcttactttgttgtcgaggctggtctcgaagtcctgggctcaagcaatcttcctgcctcggcctcctaaagtgctgggattgcaggcgtgagccaccacgcccgcctctgtgcttctctttttttgggctcagtcccaggcgggctttcccctcacaatagccaggatggtccttggggtctctaggctcccatggtcctggctcagtgactccagtgggaagtgggggcttttcgaattgctccatcagaagccccagggctcactgtgattcactcatccttgagccaaccactgtgaaccagaggatagaatgctctgatgaagcagctctgatctgggaggtgggat[133 bp omitted]tgaccaacatggagaagccctgtctctactaaaaatacaaaattagccgagcgtggtggcgcatgcctgtaatcccaggtacttgggaggctgaggcaggagaattgcttgaacccaggagatggaggttgctgtgagccgagatcgtgccattgcactccagcctgggcaacaagtgaaattcaatctcaaaaaaaaaaagaaaaaaaaaaaggtgctaatccaaaggggaaaactgggtctctcctccctgaggaggaggagcagatcctaagctggcatgtgaggttaccaagggcagtacaacctgcattccaggccctctgtttagaacccccttcccagcagcctttgggttggggctggcgtctgaccctgtcaccctgcagaacctccacacatggaactcatccctgctggacctggagacgctgagcctacagagcagagctgccaggctgctcaaacgcaggtgcccgcacccctgcccccatcacccttcctactgcggctccacgtggcccaggtctcgagacctccattgcctcactcctgccttctccctgcagcaaagcctccatctcctcctcctcctccctcagccccagcgatgccagcacttcctcattccccaccagctctgatggcctctctcccttctcggagaccttcatccctgactccagcaagggccttggccccagggcacccggtaagggctgagaggcaaagactgagggcagcctgggtgcaaatcccaactctgccactgaccagctatgggactttgggcctctctgggccttgtttctccagctgtaaaacagggataaggccagatgaggtgggtcaggcatggaggccgaggcgggcagattgcctgagctcaggagtttgagaccagcctggccaatgtggcgaaacccggtatctactaaaaatacaaaaattagccacgcgtggtacataatggtgcatagtggtgcatgcctgtagtcttagctactcagtaggctgaggcaggagaatcacttgaacctgggaggcggaggttgcagtgagccgagattgcgccattgcactccagcttgggcgacagagagagactccatctcaaaaataaataaataaatggtgccatcatagtccaattgctgggctcaagcaatcctataacctcagcctcctgagtagctgggactacaggcatgcaccactatgcccagctaattgtttttatttttttatttgttgagatgagggtctcactatgttgctcaggctgatctcaaactcctgggctcaagcgatccccccaccgccttcgcttcccaaagcactagggttataagaatgggccattcgttatgcccagctggttgttgcagttttgaatagggaagccagggaaggtgaccaagatctgatggatgtgagagaatgcaccgtgcgatacatgaaggaagagcattccaggcagagggaacgacaggtgtaaaaggcaaagccttcgccttttaccgggagagaggtgcagccaagggagggttcttaagtacgagaggcctggtctgactcaggtattcacaggctccctctggctgagagtagggaacagatttggaggagagtagagagaccagggaggctatttaagagtccaggttgggtgagtggggctggagcagggtgagggctgtagcgggtgggggagtgggtagattctggggaatatgtcttctggtcactgctgtaactccagtgtccagaacggctcaataaatatttgttgaatgaaaccaggcactgtgactcacgcctataatcccagcactttgggaggcccaggtgggatgatgatggcttgagcccaggagtttgagaccagcttgggcaacaaagcaagaccctgtctctacaaaaaaataaaaattacccccgtgtggtggcacacgccttttgtcccagctactcaggaggttaaggcaggaggatcgcctgagcccaggaggtcgagactgcagtgatcgcaccactgccctccagcctgggtgacagaacaagactatatatatataatgaacaaagacttgaatgatgacagatggagaagaccaggagtgctcgctcccctgactttgaccccttcccctcttcccaccccagagaggagctgggacagtatctggagagcctgtctgagtaaccccctgcacagttggagggcgtgtgtgcaggctgtcctggggttgctgatctccctggcccctgcctcaccctctcctctctacctccccctacagcatccccggcaccagcccaggcccagacccccacccctgctccagccccagcctcctcccaagcaccccttcggccagaggatgacattctgtaccagtggcggcagcggcggaagcttgaacaggctcagggaagcaagggtgacagagcttgggtgccgcctctgacccctgccctccgcacgttggtgagccgagggagggaggagcctggggggagctggaggaggggctgggtctgagggggactgaggaccctccaccctctctctctctgtctcagatctctcttatctgtctacagacctctcctgctccagtggagaccctcagttctctggggacccagcctaaccatgtcccactgtggagcagtgtggcccagcctggtccaccagaggccttctatgtggagaggcctccttttccctcagtgtcctctccacacatcttttgggcccccagctcccacgggttcttctgggccccacagtctgggccttgggtatcccttggggctgttcctcccacgcagcaggcctccaccctagcacatctgggctctaccctcgcgcccccggcttccctggcctccaccctcgaacccccggcctccaccccagctcccctggcctccacccttgcacccccagcctccaccccggctcccctggcctgtacccctgcacctccagcctccaccctcgcatccccagctgtcccccagggcctgcccatccctgacccaagcagctgtgcccagcctaagagcctggggcccaagtctcggaggagcagagcccctcgcccagaggctgccgagcaagtccctgcagctggccagggacctggccctcagctcaggggtgtcctgggccaggtagtggcagctcggctgttccctgacagcctggaggacacgcctcctcacttcgagggcccccctccacccaaggctggatctccgaaagtccaggccacacaaccccaaaccaaggtcactccccctccatctgaatcccagtgtcgggccaaggccgagtctctgaaagccaaggccttgccgcccgcagcggggtcagtgatacggaagagcgaagccactccttcccctggagcctgcctgcagcccgaggtcccactctctccagctgagcaggcaaccacagtcaaggcctcgccgccagccttccaggtggggtctccggaggccctggccccgcccccgcccgctgctgaccacgccccctcggaggccctgcttgcccaggccgccctgctgctgcaggctgcagaaggtgatgcccgcgccctcctggatgttggaggcaggccagccccctaagaggccggccccttggagctcattcttttctccccggcccagactccgacggcagcgagttccaggacgatcccgtgctgcaggtgctaagagcccatagggcagagctgagtcggcagaaaaggtgaccgaccctccatccccagagtctatgacactgggccccggagacctctgagacccggttaggcatccagccctcctcatcccctgtcccagcagtccgtccacagccccagattctaagcctgagcacataccccagcctctgctctcccggcctttctccagggaagcggatgcccgattatcgttcctgttggaccaggctgaagacctgggatcttggtcccctccagccgggtcgccccctaggtccccaaggaggctgctaagaagggaaggagattccctggaggccagaagactttgaattgtacagattctattttacccagtgaggctctttttttttttttcatacagttactggttatctgtgagaaaggggttgtttggaaaggccaaggggtcatgccaatttaaggaaatgccccccatcctccgctgccccatggctctgccctgccccccaccccttcctgaccacggaaacaagatctcctttctggttatatcttccttggggcagagggagtttcagacaagacttctggcaagactgggacccaccttatctggcttcactcaggagccctggctcaaatggaccaaaggactgccctccacggaggaagctactagggtcatcagagtgttggatgatggtcaggctatagcccacacatgcttgagcagcagcagcatctggtgcagctgacccctccctccttgaagcactttctctccctgcttccagcccttctctctgcacctctctggtcaggcctagtcactagcccagcatgtcaactttggcatgacccagggccatggcgttgacatctctatctgcacccacccataggtgctcttgtctagcttaatgactctaaaccccgtctctattctgataatcctcaaatttctgtctgtaacctagacctggccacgaaaccttgggctcctacctcattaccatttctacccaagggtttaaaagacatctcaaattccataggtcctaaatggagtttccaatctttccccctaggcgtgcctctccccagcttctttttttttttttttttggatggagtctagctctgtcacccaggctggagtgccatagtgtgatctcggctcactgcaagcttcgcctcccgggttcacgccattctcctgcctcagcctcccgagtagctgggactacaggtgcccgccaccacggtcggctaattttttttgtatttttagtagagacggggtttcactgtgttagccaggatggtcttggtctcctgacctcgtgatccacccgcctcggcctcccaaagtgctgggattgcaggcgtgagccaccgtgctgggccccccctccccaactttcttcggctctgtcctttgccgctcagaccaaaaaccttagagttgtctttgacttctgtctttcccttccacccacagttaaccaggaaatcctgccatctccgcctttattttattttattttttgagatggagtttcacccttgttgcccaggctgtagtacaatggcatgatctcggctcacggcaacctccacctcccgggttcaagcgattctcctgcctcagccttctgagtagctgggattacaggcacctgccaccacgcccagctaattttctttgtttgtttgtttgttttgagacagagtcttgctctgtcccccaggctggagggcagtggcacgatctcggctcactgcaacctctgccttgcaggttcaagctattcttctgcctcagcctccctagtagctgggactacaggcgtgtgccaccacgcctggctaatttttgtatttttagtagagacggggtttcaccatattggccaggctggtctcaaactcatgacctcgtgatcctcctgcctcagcctcccaaagcgctgggattacaggcatgagccatcatgcctggcaattttttgtatttttagtagagacgaggtttcaccatgttggccaggctggtctcgaactcctaacctcaggtgtcccacccacctcagcctcccaaagtgctaggattacagatgtgagccaccgcacctggcctccacctttaaaatctatccagaattcaactgcttctccccttctactgctcacacctcaatctaggctgtcatcacctcctctctggactgttggaaaacttaacggtttttataaacctgatattctttgacacacttgccatcaagaggcagagtctatgtcccttcatcttgaaactgggcccctcaacaaataaaatgcagaggaagtgatgc[138 bp omitted]atggtgaaatgtctctactaaaaatacaaaaattggccaggcattggtggtgggtgcctgtaatcccagctactcaggaggctgaggcaagagaattgcttgaactcagaaggcagaggttgcagtggaaaaaaaaaaaaagataatttctctctctttctctctctctctgacacttgctttagaggctacattaaaaaaaaaaactagttgccatgctggggaggggtttgggttacacaggtgtatgcacttatgaaacttagtgaagtgtgtgaatttcattgtatgtaaagtttacctcaaaagaaaatattgaacgccagttaaagatacgcctgtaatctgacttctttgggaggccaaggcgggaggatcacttgaggccaggagtttgagactaccctgggcaacacagcaagacctgtctctacaaaaataaataagtaaataaatagccagatgtggtggcacacgatttgcagtcccattactaggggcggggaggggcgctgaggcaggaggtttacttgagcccaggagttcaaggctgtattgtagtgaactaagatcatgccactgcactccagcctgggctacagagctagaccctgtctttaaaaaaaagaaaagaaaaaaaaaagtatgtacactgaaatatttagggaacaataaaccaatgtcgacaatttattttgaaatgcatccagagatgagttggattgatggataaatagtgtaataggtagatgtgagataaagcaaatacagcaaagtgttcatggtaggatctaagtggcggatatgcgggtgtccactgtaaaatttttcaactttgctgtaatttagaaacttttcatggccgggcgcggtgactcatgcctgtaatcccagcactttgggaggccaaggcgggcggatcacgaggtcaggagatcgagaccatcctggctaacacggtgaaaccccgtctctactaaaaatacaaaaaattagccgggcgtggtggcgggcgcctgtagccccagctactcggaaggctgaggcaggagaatcacttgaacctgggaggcagagcttgcagtgagccgagattgcgccactgcactccagcctgggtgacagagcgagactccgtctcagaaaagaaacttttcataataaaatgatggagaatatatgattggggttgttttgatatctgcatttacaaaatggagggataagatggatttctagtaacttctgtatgtcacatggtaaatataatatttgttttcaacctttctttctttctttttttttttttttttttttgagatggagtcttgctctgtcacccaggctggagtgtagtggtgcaacctcggctcactgtaacctctgccttccaggttcaagtgattctccttcctcagctttccgagtagttgagattataggtgcatgccacctcacctggctaatttgtgtgtgtgtgtgtgtttttagtagagacagggtttcaccatgttggtctggctggtctcgaactcctgacctcatgatccacctgccccggcctcccaaagtgctgggattacaggtgtgaggcaccgcacccggcctgtttctaacctttctaagcaaaccatacatttaaatgaaatcagagtgggcacagtggcacaggcctgtaatctcagcactttgggaggccaaggcgagcagatcacttgaggtcacgagttagagaccagcctgggcaatatagtgaaactctgtctccactaaaaattagctgggcctggtggcgggtgcctgtagtcccaggtgctcaggaggctgaggcaggagaattgcttgaacatgggaggcggaggctgcagtgagttgagatggtgccactgcacttcagcctgggcaacagagtgagactccatctcaaaaacaaacaaactaacaaaaaaatgtaattgacaagaaaaatagctgtttagatataaggagaaataaaagatactatagtagcagaacctgatctagctgggtcacgggtggggtctagaagcattcctgaggaagttacacttaagctgagacaggtagaaattatctagttaacaaagggctgtcctaattactctagttggataaccgctcccaaaacttagtggcataaaacaattattttattatgctcatggattctgagagtcagaggtttggacagggctcatatggggacaatttttgtctcctccatgatgtctggggattcacctggaaagactcaaaggtgacttgatagacttgatggctgtggagtagaatcctccagaacttcttccgtggtcttctcccagtctgactgggactattgactaatgcctatacatagctccattggcctgggcttcctcaaagcatgtctgcttcagcatagtcacacttcgcatatgatgcaccatggttctacagctcattccagtggacgagaacattggtcaagaagctgcattgcctttcatcacatagccttagaaatcaccgtgtcacttccactgttttctattggttgaagctatcctagtcccacccagattcatagaaagcaatcatagagtccgcgtcttgataagaagagtgtcagagaatttgcagctgttttaaaatcactgcaggaccccattctccatgatgtgattattacacattgcatgcctgtatcaaaacatctcatgtgccccctcaatatatatacctaaatatacctgttatgtacccagaaaaattaaaaaataaaaaaaaaaatcactgcaggggttgatggggaaacactagacagaaggaatatcgtgtgggaaatccctgtgatgagagtgaggtcagcaaatttagtacataagtaactgcacattcacctctccctcagcactccctttcaccagcccttgcttaattattctccatagaatgaatcaccttctaatattttttttttttttcagacagagtcttgctctgtctcccaggctggagtgcagtggcaaaatctcggctgactgcaacctccgcctcctgggttcaagcaattctcctgtctcaggctcctgagtagctgggattacaggcacacgccaccacacctggctaattttaatatttgtatttttagtagagacggggtttcagcatattggccaggctggtctcgaactcctgaccttgtgatcctcccgcctcggcctcccaaagtgctggggttacaggcgtgagccactgtccccagctttttttttttttttttttttttttttttgagacagagtctcacttcaacacctaagctggagtgcagtggcgcgatctcggctcacagcaaactctgccacctgggttcaacccattgtcttgcctcagcctcccaggtagctgggattacaggcacgcccgccgccacacctggctaatttttgtatttttagtagagacggggtttctccatgctggccatgctggtgtcgaactcctgacctcaagtgatctgcccgcctcggcctcccaaagtgttgggattacaggcgtgagccaccacgcctggcctaatattctatattttgtttaatgttaattttgttcattgtcttctcccagtagcttttgagctccaatgtgggcagggtatattttctcctggtttggttgttgatgtatgtacaaattgattagagtttgagtgaatgaatgaatgaatgaatgaatgaacagaccaagaccctctgagatgagaatttgttgagggcatgactaaggagagaccctcctgtgaagggcgttattacagtgttatctgggcatgctcagtattagcaggctccattgggaatggctttatggggggcataagcatgatctggcatttccccctaagcattttcctagaaaaaaaaaatcaaggctggagattggcccgtaataagcagtagaaggggaaacaagaaaatgtccagtgggcaggggaggccaaatcgcagaaagcctcgggttacgtcctaggcaaggtatatgaggcaacgagaaacgtccatgggcggagcgtcctcggcattatgtgagcggggtcgggatcaggactgaaaaggtgagacttgggactgggactttgaaaagctgcttaaggaactgggcactgctctgaggccgtgggagaatccaattaagactatcaggggctggctggcgtggtggctcacgcctgtcatcccagcgctttgaaaggaggctgaggagggagtatctcttgagccccagagatcaagaccatcctgggtaacatagtgagacccccatgtctaaaaaaaattagccaggcgtggtagcgcacgcctgtagtcccagctacatgggaggtatcgcttgagcccaggaggttgaggctgcagtaagccacgattgcaggactgcgctccagcctgggcgacagagtgagaccctgtctcttaaagaaataaaaataaaaaagtcagaagaatggacactgggagtggacgaaaggtagggtccattgcttggtgttggaagtgtcggaagcaaagcataaagaacctgggggcttgtctcaggagggcgatgacagccaatgaaaagcagtcatgggcgtggcgctgtcaaacttcgaggggcgggaccgaggacacagagccggggcggagcccaaggtgaaaccaatgagaagcctccgggtgggcggggcatcggcctaaggccaagggcggagccaatgagaagcagcgccgcgttcccgctgccccccgcccccgtggggcgcgcgccggagccacgggcagccgttaggggcggggtctgcagccgcccgcgcgcggctcgcgccctcccctttgtgtcgccatggcggcggcagcggcgacgagaacggcgagcgaggggtcgagcgcggccggggcctgaggaggctacgcgaccatggtggtaagggtcccacgcggccgtcagcctgtccgtccggatgtcagtctgtccgtgcgcagccccgccccgcgcgccccgcccccggccccgcccgatcccgcggcctgtgcttcagccgtggtccctcccgtcctgcggccccatcccgggtcccagcccgtacctcgaccccgccccctaagcgcgcatccccgtcttccacgccctggatggggtgacagggacctagggcctgggctgggaggaggcggggctagtccaggaagggacccgcgccacccaagtggcccctgcaggggcctcctgaggctcctgggtccttccccagctcccatcccagcaccttcctcggcatccttctgccagccctcagccctccccggcggagccccctcctcctccccacagcccctttctcattcccgagccccaccccccacccgctccatccccagcctgacccttttcttctccttctccctcattttcaccctatcccagttcctctcaatcccccccgccccgcatcagtctgagcctttgcctcgtctctccagccactccttccttactccaccccaacaggccagcactgtacctcccttgatcctcgggtctgctccatctccttgtcctcatccccctcccccaccatttccctctcccaccatgctgctcccgctcattcatccattcattccctcacttagcagacattcactgagaccgcctctgtgcaggccccacgctccaggcacagagagagtcagctcccatcctgccttggggaaccttatgggctggagggggacagaccctgagggtgagaccctgagggtgactgggggttgcagggacatggagcagggagacgctacagcccagtgaatctgtctggcagctggttaatttattcatcagattttacccagtccctgctgcgcgcgactgggctggcactggggacccagaaaagaatcaggaacaatcatgtctgaacaccaactcaatgcccagctctatgctggggagctcagtctggggccctccttctgggaggccggtcatagtccaatgagagagatgaacttgtcaccaccagtgccatctcagagtgatcagagctgtgaagggagaagctctggtcaaggcatggaacctgggatgggggaacctcaggggatggagagagtccagaggagatgccaggtgcagcctgaagggtcagggagaacttcctggaggagggcacatgtgagttgggacctgaggggtgggagtgaggatgaatgtacccagggaaaggtggggcgagtgttccaggctgagggaacagcctttgcaaaggcctagaaggaaatgagaagagggtgctttttttggactcttagaagttcaagagctctgagagtgggggcaatgggaagagatgggactggagaggtaaacagaaatcagctcagggaagtctcgattatcagaccagagaattcagacttcgtcttgaagacaacagggagtcattgaaggcccaggatctatggagaaatagagccagatttgtgttttctgaaaacgatccaggctattgcggaaaagctggcaggaggggagaggctggaagcaggaaggctgatgagatgggagttgtgattgtctagacagtggtaggagatcactgtactctgcaggggctacggaagggttttcagcagggagagatgggaccagcatgctctccatcctgttgccccgcctcacgtctggcccctgcttctccagtcccccaccccagaccacacacgaagaagcagtcctgtcctcagcccagccctcacctcccccgacctgccatcctgcttcatgctcagggcggtgtgtggagcgcccggggctctggacccgcgctgccagataacaatgctctcgttgtctctttgctcccatctctgggggcctctgattctttctgctctacaggcacgcagcactgacagcctggatggcccaggggagggctcggtgcagcctctacccactgctggggggcccagtgtgaaggggaagcctgggaagaggtgagggtgagggaggaaagggctcagctaggagctggggagactcaaggagctgctggtgacgcatcccctgtctcccaggctctcagctcctcgaggccccttcccgcggctggctgactgcgcccatttccactacgagaacgttgactttggccacattcaggtatgggggctttgcatttgcacccaggagggaagacaatatcctacccaaccttgcaacgatatcaggtgctttgcttctgaaacttatccctgtgactggctgctgcacgcgtctgagcagtcagtagcaaaagttgcaggagccacagcagatggggagagctgctcattcattcatccatttgttcttttattcattcaacaacaacttttgttaggtatctgctctatgtcagggaccaggacatcaccaggccctgtcctcggggaggtccagaagggagtcacaaacccgtccctagatagtgccatccccaggaggtcaggactgggacaaaagtccacctgggccttgctttccctctgcagctcctgctgtctccagaccgtgaagggcccagcctctctggagagaatgagctggtgttcggggtgcaggtgacctgtcaggtgaggccatcccgcctctcatctagcctgagagaatggccactgtagtcctcagctcggtgtcatggggcccctgctcccttctgtccctctgctcccacagggccgttcctggccggttctccggagttacgatgactttcgttccctggatgcccacctccaccggtgcatatttgaccggaggttctcctgccttccggagcttcccccgccccccgagggtgccagggctgcccaggtaacctgcttgttgtctcagcccctgcctcatgagtgtgtcctcatccacagtgtgaaatcatcaaggcagcgggatagagaaatatttaaatactggtatggcccaagtcccaaccaatctgaatgaatggagaagccttagaaacgtagtaggcttctgctacatttagctttgctaagttttaggatcatggggagttccagggggtcccatgggagggtcaccatggtcatgccaaccagggtactcaagagcttggcccagcctgcttattcattcatatgcccatatctcagtacctaacagctgagcagcacccatgtgttcaggatgaacttcagcccagagacgagctagggcagtgtgggagggcagtgggctctctcacgtccactcacagaggcccactctgacaacctgcccccagatgctggtgccactgctgctgcagtacctggagacactgtcaggactggtggacagtaacctcaactgcgggcctgtgctcacctggatggaggtgggcctgggcagggggcttggagattccgagtgggtgagggggtgtctgaggggcgagaagcagcctcggtgtgtgtgtgggcatagaaaagaaaggagccagagtggaggaggcgttgatattttagtgtctgtgtgggcgcatgcctgtgagagaatgtgtgtgagcatgtgtgtgtgtgcacgtgtgtgtgttagcaggtgttcggctttaaggatacaagggtttaaatgtatatcagttagaaatgggttgggctgtaactcacagaacacctggctatgagtggcttaaaccagaggggttttttttcttttcttgagatggagttttactcttgttgcccaggctggagtgcagtggcatgatctcgcccaccacaacccctgcctcccaggttcaagtgattcttttgcctcagcctcctgagtagctgggattacaggcatgtgccaccacgcccggctaattttatattttcagtagagactgggtttctccatgttggtcagactggtctcaaactcctgacctcaggtgttccgcccacctcagcctcctaaagtgttgggattataggcatgagccactgtgcctggcctctggctaattaaaaaaaaatgttttgtagagacagagttttgctatgttgaccaggctggtcttgaactcctggggtcaagcaattctccaggctcaccctcccaaagtgctgggattacaggcgtgtgccaccacgcccagcacagagagattttagatggcaaccgtgtggcatctgctgtggaggatgaaggtgcagaggtggatggggaagccttcaggtggggaagcctttgggtgggagagtcctgggacatgtgaggggaaataaaggggtttttcttagaggtttccccacccgcagagggtgccagggctgcatccctacaaacaggaatctaggtgtttgaccaatagctctgagtgacaggggctcttgacgggggcgggcagtggcctcacccagcgcggaggagcttggtatgcctgcactaacaccgtcttctgacctgtccttgccacattccacctctatttcagctggacaatcacggccggcgactgctcctcagtgaggaggcgtcactcaatatccctgcagtggcggccgcccatgtgatcaaacggtatacagcccaggcgccagatgagctgtcctttgaggtgaggctgtggggaagcagattccagctgggctccccacaccccctgctccttctgacccttctcttcccacccgccctctcccaggtgggagacattgtctcggtgatcgacatgccacccacagaggatcggagctggtggcggggcaagcgaggcttccaggtgagtccagctgggcgcggacaggtggggctggggtacctgccaactggggtggcccagctactgaccctgaccttcctcaggtcgggttcttccccagtgagtgtgtggaactcttcacagagcggccaggtccgggcctgaaggcgggtaagtgccatggatggatgggaggtgtggggaggggtgggaaggggtggggcctcctgcgtcttttgcctcccactcatcccttccaccccatttttcgcctagcagatgccgatggccccccatgtggcatcccggctccccagggtatctcgtctctgacctcaggtaatagaaataggcggtcaggtcccagcccctaccccaccaggcccctggccatgctgaccccacaagacctgcctttgccctttgccccttgcccccacagctgtgccacggcctcgtgggaagctggccggcctgctccgcaccttcatgcgctcccgcccttctcggcagcggctgcggcagcggggaatcctgcgacagagggtgtttggctgcgatcttggcgagcacctcagcaactcaggccaggatggtgaggccggggcccacccaccccacccgtcacaccagggctgcggcccacccagccctgaccttgctttctcccagtgccccaggtgctgcgctgctgctccgagttcattgaggcccacggggtggtggatgggatctaccggctctcaggcgtgtcttccaacatccagaggcttcggtgagggcccttagccaaccctgtccttccacaggcactcacccagcacctccactccagccccgtgctgcatgctggggacacagttaccaggagtcaggagtggcaggatcaaggctggggtcagggacagctctcttgagagtagagttagcagtctaagcgaggactatcttcaccgagcacctgccacgtgccaggcactgttctaggcactggggacgcagcagtgagtgagacagccagaaacccctgccctcatagggcccatgggctagaggaagagacaaacaggggagggatagagttcaccagaagatgacaggtactatggaggaaaacagattggggtaaggaggatggcgacgaagagccaagagggaggcctgcagttttggatggcaagggcagagccacctcatgcgagggtctggaggaggggaggggcaggccatgcagagggagcagcagggcaaagggaacagcaacaggaggccatggccaaggagtccccgtgccagcgcaggcaaagccttcatgttagggttttggcttttactataagtgaagggggaaccgcaggagggctctgagccggggcggggtctagaggcggggaggagccaggcgagatctcggcctgcaggaggctgagaggggagtgcttgaagcctgcaggggggtggccaagagggaggcaggaggtggcaatgggtgggagattttaccacaggcagtggggccccaccagagaattgggagtagcagggtgctgggattttgtccacattttccagtgccctcttacagccaggagaatggcagctgcatggtaggagctgctcatgctctggagtcagacagtcttgggtagctgcaggcagaggcacctctgtctgagcctcagcatcctcctctgtaaatgcggcacccttctctttgccacacaggcttgctggggagttcagtaaggttctgcctctgaagagcccagtgtaggacctggggaagagggttccatccacctgcgggcacttgggggtaggggcaaggggagcatggccacgtgagcgagcccctctgacctggatcttcctcctccttgacacggtggtctcaggcacgagtttgacagtgagaggatcccggagctgtctggccctgcattcctgcaggacatccacagcgtgtcctccctctgcaagctctacttccgagagcttccgaaccctctgctcacctaccagctctatgggaagttcagtgtgagtaagggagctggcgggacggagggggccgggacgcctctggcccagacctcatcacacctgcccaccatctcaggaggccatgtcagtgcctggggaggaggagcgtctggtgcgggtgcacgatgtcatccagcagctgcccccaccacattacaggtaaaccaggaggggcagggcgggacttggtgggattccaagggggttgaggctcaggtgccccctctgctcccacccccaggaccctggagtacctgctgaggcacctggcccgcatggcgagacacagtgccaacaccagcatgcatgcccgcaacctggccattgtctgggcacccaacctgctacggtgagctgcttgctcgcctgcctgcccctcaggtctttccccaaaaccaccccaggaacccgcccagcttttcttttgtttattcatcgaatacgtgtctatcaaatacctcccatggacctggccccgtccctagcactggggacccagcactgagcatggccctgtcctcctgggactcatgttctcatggaggagatggaccatgaacatcaacaggaaaaatacagagtaaagtctgatggtgatgagtgctgaggaggagagaggaggagggaagggcagtgtgcagggtcagggcagtgtgaagtttttagcgagagtggcaagggaggctttggcaggtcttctgtggccagcagcagaataagcctggaggatttgatggtgaacgagacaggcatgatctctcccctgccggagttcacagtcttctgggggcacagatacataaacaagtaaaacaggtggtatgtcagaggacgggcgtaagatgtacggagaaaaataaacgagaaaggccaggggtacagagaagggagtgtacagttttgaataaagtgggtgaggaagactgcactaagaaggcaatatttgagtcaagacctgcagaggatgagggagggccccaggtgcgcacgtggggagtgacaggctgagggaacggcaggtgcagacatctgggcctgggccggtgcctggtgtgttggaggagctgcagggaggccggtgtggctggagctgagtgagtgaggggctgagggagaggagatgatgaggtcagagaggtgacggggaccagacagaggggtgactcacaggtcatgggtcacagtgaggactttgctcttgcctggagcgaggtgcagccagggcagggctctgagccaggcgggccctgatggaactcaggtggtctcaggctccctctggctgcaggtgggagcatactttagggtggggaccggaaggaggctctgggatgtccaggctgggggagatggaggctgggccagatggggggcagtggagggggtgacagattgattgtgggagttaaagaggggggctcagggcaaccccaaggtgtttggccagagccacaggaagaaccacactgagatggggaaggcaggaggggcgggtctgggggaaggttgagagcccagcgaggcgtgatcagtttgaggtcagaggtgttgaatagacagtcactgcctcccctggctcccctcattgccctgccagaacctgctggctgggctcaaggcacccagcctccctcccgctcctcccacccaggtccatggagctggagtcagtgggaatgggtggcgcggcggcgttccgggaagttcgggtgcagtcggtggtggtggagtttctgctcacccatgtggacgtcctgttcagcgacaccttcacctccgccggcctcgaccctgcaggtatgccctcccaccccctgaggtcctggctactgcccaccacgatcagggctgcagggggagggcaggtgggctcccagtcccgtccccaccccactgaagctgggcctccctccggctccttgaggatcccgccccggcctctccctccccgcgcccccctccttctcatttcagctcctccgctcaggattcccacctcttggcccggacgccgctcttccttcaccccttgtagctcctgggggcgcttggggccatgggtccacctgggaggaggtgggaggtccccagacttgaccccgccccggccccacccagactccccgccctgccccggaccccagcccagtcaggactcagcacgtcggagggccctctggcccgaggtaactgaagccagagccgctgccctcgctggctgccgggagctgcctcctcatcagctcgtcccgccccgccctcctcccacctgcctgctgcccgcctgctcccgcctgatccgccccggccccctgccttgccagcccgggtgggcatgctgcggggccggggcttgggctgtggcgcttggctttgcctgtggccttgggcggccccagagctgacagctgccccctttccacactccccaggccgctgcctgctccccaggcccaagtcccttgcgggcagctgcccctccacccgcctgctgacgctggaggaagcccaggcacgcacccagggccggctggggacgcccacggagcccacaactcccaaggccccggcctcacctgcggaaaggtgagtgggatgctgggggtggcgaggggcaggtggaggcctggttcctcagacggcctcctgtttctcccccaaaccgcaggaggaaaggggagagaggggagaagcagcggaagccagggggcagcagctggaagacgttctttgcactgggccggggccccagtgtccctcgaaagaagcccctgccctggctggggggcacccgtgccccaccgcagccttcaggtgagaggctgagccatgggctggtgggcagcgatggtcgctggagtgccctcctacctctccctctcctgcaggcagcagacccgacaccgtcacactgagatctgccaagagcgaggagtctctgtcatcgcaggccagcggggctggtgagcaaggcgggcaattggggggcgctacctgtgcccatgtggagccgggaggaattggggccctggtttggcctccaaattttatacttcacatttgggggccctggggcttttgaaaaatttaacctggcctttatgtacaatgagttggatacagtatcacctttggttcatcacacactgaacttaacttactcattggtccatgacgggccctttaaaagtctttattattcctgttgaacattttaaaataatatcatggacacccatgaacccagcagccagaactagagcagccccattccttctccccttcgagttcctccccactggaggcatcctctcaatttgcagactaccctgcccttgctttccaggtctgatcatacacaggtgtgtgtgtaaggatcatactgctcagttctagccattttggaaacttgatttaaagggcgttgtaagaaagggatgccgcactgtatggggagcttggctttttctccatcgctacctcacagcccgccgcgctgctgggtgctgctctccgacctctgcggggggctgcttatccaccccacccagccgtgcctctgggggctcttctgagccaccgcgccatcctcacactcctggggtactgccctcccacatacccaggagcccaggtgctgtcctgctggctcagcagctgtatgtgaatctgttggtctcgtgctcacagcctgtggggcagccacagggccttcgtgctttgggccggaagtgtcctcttcatggtctccactgtcaatctgaacagctcttcctggcttcacactactgtggccctctccaggaggcgcctcttcatgtcctttccccagctttctgtggggctgtgcgccctgttctcagggatggtctcactgaccccacccctccaggcctccagaggctgcacaggctgcggcgaccccactccagcagcgacgctttccctgtgggcccagcacctgctggctcctgcgagagcctgtcctcgtcctcctcctccgagtcctcctcctctgagtcctcctcttcctcctctgagtcctcagcagctgggctgggggcactctctgggtctccctcacaccgtacctcagcctggctagatgatggtgatgagctggacttcagcccaccccgctgcctggagggactccgggggctggactttgatcccttaaccttccgctgcagcagccccaccccaggggatcccgcacctcccgccagcccagcaccccccgcccctgcctctgccttcccacccagggtgaccccccaggccatctcgccccgggggcccaccagccccgcctcgcctgctgccctagacatctcagagcccctggctgtatcagtgccacccgctgtcctagaactgctgggggctgggggagcacctgcctcagccaccccaacaccagctctcagccccggccggagcctgcgcccccatctcatacccctgctgctgcgaggagccgaggccccgctgactgacgcctgccagcaggagatgtgcagcaagctccggggagcccagggcccactcggtgagtcctcagcctaccccacccctgtccccgccagctgtcactgactctgagggcctggccccagctgaacccctctccattcatttatataggtcctgatatggagtcaccactgccaccccctcccctgtctctcctgcgccctgggggtgccccacccccgccccctaagaacccagcacgcctcatggccctggccctggctgagcgggctcagcaggtggccgagcaacagagccagcaggagtgtgggggcaccccacctgcttcccaatcccccttccaccgctcgctgtctctggaggtgggcggggagcccctggggacctcagggagtgggccacctcccaactccctagcacacccgggtgcctgggtcccgggacccccaccctacttaccaaggcaacaaagtgatgggagcctgctgaggagccagcggcccatggggacctcaaggaggggactccgaggccctgcccaggtcagtgcccagctcagggcaggtggcgggggcagggatgcgccagaggcagcagcccagtccccatgttctgtcccctcacaggttcctacccccggcttcttctccccagcccccagggagtgcctgccacccttcctcggggtccccaagccaggcttgtaccccctgggccccccatccttccagcccagttccccagccccagtctggaggagctctctgggcccccctgcaccactcgacaggggagagaacctgtactatgagatcggggcaagtgaggggtccccctattctggccccacccgctcctggagtccctttcgctccatgccccccgacaggctcaatgcctcctacggcatgcttggccaatcacccccactccacaggtcccccgacttcctgctcagctacccgccagccccctcctgctttccccctgaccaccttggctactcagccccccagcaccctgctcggcgccctacaccgcctgagcccctctacgtcaacctagctctagggcccaggggtccctcacctgcctcttcctcctcctcttcccctcctgcccacccccgaagccgttcagatcccggtcccccagtcccccgccttccccagaaacaacgggcaccctggggaccccgtacccctcatagggtgccgggtccctggggccctcctgagcctctcctgctctacagggcagccccgccagcctacggaagggggggcgagctccaccgagggtccttgtacagaaatggagggcaaagaggggagggggctggtcccccacccccttaccccactcccagctggtccctccactctgagggccagacccgaagctactgctgagcaccagctgggaggggccgtccttccttcccttcaccctcactggatcttggcccaaccaaatcccttgttttgtattttcttgaaccccgaccactaccccaggtttctaactttgtaacttgcttctgatgtgggtccctaacctataatctcagcttccctaccctggactgaagggtctgcccatccccccaccaccctccatcctgggggccctcgcacaaatctggggtgggaggggctaggctgaccccatcctcctctccctccaggagcccccagcatgtcctgacctgtgcacggggatggggggacaactcctacccttctttccccacatgccccactaaaccatctgacaacattaatgaataaaatggtgaaaatgtggctgctgaagtcgttctggggccaaactcagtgagtgaagacagacagagggggcactttatcattctatttccttttggggaggcaccaaggcaggagttactcctgggagcctctgagaggtggtatctgcagagaggggaaccatgggcaccctgggagtctaggtcaggagtggggctcaggctgggcttttctccaagctgacatcctttttgtagctctgctatgatctcctccagcaggtccatcctggggagcagtgaggcacaggtagacctagggttacctcagggataaagacctagggttacctggggtcctcccatccaaggcctcgggtctcacttctgcaggctggagaagagacctcctctagtcagctcagtaccgggtgcctgcaggagagaaggctggagctgccacctggtagccatggtgctccagcgggcctgggagggcagatggggcacaggctgagctcggggtcctctgcttagcctgccctcgtggccttccctgccagcagcctcccagtgtgtgggaagcctccctgtgggtcagcaggctggggatgggctcacagggctggggctccagcagaataaccctgtgtgtgcgccgcagcagcccctgcagggctggaatcttggctgagagcttcctcaaactgttccgcagagctctgggtccccagcagggaggctgagtcctagaggctggagttggagtgcagggaagggccctgggggaagcagggttggttaagggtcataggtgagtgaggggacagttgggcgaccctaaagttccctggtcaaaggagaggcagccagggaacttcgggttggtgactcctggagggcgggcggagggggtcacaggttagcagtgggacagttgtgcagggctctgggggtatctgtactgttgagctgggctccaggcagcagtgcaggctgaccctggctgtggggctgtggccagacccagggctgggtcctgggctgggcccagagctgctgcctagagtcaagctgctgcccaagttccaggctgcaccccttgggatcctgctgtggtctctgacctcaggagtctcaggcctgcagagaaggatggcagagagctggcatgggttgcccaggtgtcccacagctcccttggtcccccacagccccgtcctggctcctacctggcatgggatggggcctggggacatcacaggggccacaggcctgggtgtggtcttggctctgtgagccacttgatgtacagtttctctgtggggacagaccagttggtcagcacctgccagcatcccttccttgccctctaacttggtggggaaccctggggtgcaggggatagcgtggtccactccattggggagctcacctcaggagccacgtcctgtggaccggaggctgggtgtggggacacaggcttgcctggggtcccatggccaccacccaccccctgctgacctgccctgtacctgggccggggcctcccgcagtaggtatcgggtactctgcaggctgccccagcggtcagcaggtgctaggcctagcccagctcgaatcagggcctggtagggtgctggcacccggggctccagggccggactctcccctgcctccagcttggccttcacctcaggtccccctctcccagcccagggcagctctcctgccaggaagcacagttagggacccaagcgggagggtgccttcatggggtggggcgcagccactcactcaccagtgaagacctcctggatcaggatgcagaagctgtagaggtctgaggtggtggtgggcatgtcaccgcagatcagctgaagtggcagccatgggtgtagttcagggggcgggggaagccctgggcctgggcctccccaggggtagcccttctgctgcctgtggagcccaagggccctggtgagccgacggctgctggacagggacctgcacccgccaccagacaggaaaactgagaccccaggtcacacagcccagcagtggtagggccagcacctagctcctatgccactcacagtgcccctctccacccccacctcctccctggggtctacaagacaccactgcccatggccacggaggctggagaacagggaggaggggagcgtgcaggcccgagtcaaggggcagcaggcagggcaggcactcacctgggccgcagccagcgctggcgtaggaggcgcctgtgctccaggtggcccactttagccaggcctggctgcaccagctacacggtgtgagagctgaagccactgtgagctcgccagtgggcctgcaggaacagcagggcctttagcacctgctgcagcagggggccggggcggcaggcccagcacagtcccaggtgcctcctcacttggtctcggtgggtgcagcaccccctgcagggagcccagccacacaggctcaaagagaaggcacagccccgacagatctgcagagggactcagtgccatcagcagcaacaggccagggtggtgcagcttgctgggcaggaggacagcaggccactcacgagcaggccccagccacacagggtgggagatgctcctgggcccagactgcccaccacgtgccagggcaggcaatctgcacctgccatcagacagaggaaagactgatcccaggtcacgcagcccagcagtgggagggccagcacccaccgcctacctcatcctggtgccttccacacccccacctcctctcaggcctacagggcattgcacacacaactggtacccacccactttccagtggggggatcgccccagcagaagggctccatgccgggtgctggcccagaagtgaagattctggccatgactacggccacacacccttgtcttccgtgggagggccaacaggaggcggggctgggggctggcacaggtacctgcagtgctgaaggtcagccagtagcacatctgtctgggttccaggggccttcggctgctgcacagtcattttgtgacccatccacaggaggctggagaataggggcggggcagtacaggcctgagacgagggggctttccctgggaggggagcaggagagctggcaagggcacagcggggctctcacttggccatgagggtggggagctgctctcataggtgcagtcaggctctccctgggctgccagcagctccttggggtccacaagggggatgcccgttaccagccccggtggccacaggctactcagctagggacaggcaggatcatgaggcacgaagaagacaggggtggttcccactcctacagccactcctgcttacctgaccaaaccccaaggccgggacttgggaggctctcctgatctgtgctagcctcagcatcctggggtgggggcaggccgagggtaagtctggggtggctgggaatggttgggcgggtgggcttcaggatgtggacggttacctgtctgcctgcatcagcctcagggaggacagggagccaggcgggctgttcccaaatctggcctgcaactggtccagagatgccatgggtggcaactcaccgtcatgcacgaacgctgatatgtgggcccggcagagctgcaacaactccagcaactggaggagggcacgtagggtgaggcctgatgggtgccggccctgatccctcactcccaccagggccactgctcacctcccagttctgcttggccccaccctgctcagcccagtcttgtggtgtgcgaccccgctggtcatgcagttgcaagtcaccccctgcctgcagcaggggcaccatcactaaagaaggcgcctgcaggcacgggggtgctgccatccaggcagcggttagagcagaacaacgcggtgggagtcgattagggaagggactgaacagggacaaaaaggggcaggatgggggccctgggggatgggaggagtcaccatgtcatgggaggtgaatatgaggatgggaggggtcacatgagggcaggatggggtctttagggaatggaggatcactacgagcatggaggcactgggagaatgggaacagtcactggggaatgagaaggggttaattgagagaataaggagggttactggggggacaggagggtcaccagggaatggaagaggcatctcgagggagagatgcctcaggggaagagagccctagctctcaggctttctggggctcaaacttgggcccctggggatggggggcatcactggctggccagccactggttgggcttggcaccaaaggccagcaggagctgcatggcagagccgtggcccagcagcgccgagaggaagagcgctgtctgcccctcagagttctccccgtccacctggacacctaaggggcaggcaggcttaggacgccccaggcccatactcctgggttggaggcctgagggccgctaggcaaacacccttgccaattcccatcctccacagcccctccatgactggatgactatggaccccaggttccatctctgtgtcctggaacccctgccctccagctgctgaggaccatgcctcgcaatccacctcaacacagtgctccccaaatcattaagtccacagagttgaaacaaggggtgacatctgcctgctgtgcaaacatctatcccccaacccagggggatcaaaatcacacaaaggtccccatgggccaggaggaagtggatttcaggggactttgacttccaggagccttgcgcactggccgggacaggcggactccacccagctgtgactcagtgtggtacacacaggtcccatgaggccagcactcagcaattcaagtaaagcaaactctggattttatcagatctctcaaattttatttattttaatttttaattttttgtagagatggggtctcattatattgcccaggctggtcttggactcctgggctcaagcagttctcctgccttggtttcccaaagtactgagattacaggcatgagccaccatgcatggtctcaattttatttttgaagcctgcatctaagggctcaatccagttggcaaccccctccatgtccttacctccaggcctccgccaatcccctccccaaccatcttcctgctcagctccccctcccaaccactcactcctgccccaagccctgggtctccaaacccgtcattccccagttcctcttcctccagcccctaccccaggtagagcaaatgcatggtatccttgtccttgcactcctgtgtccttggcagacacggctaattattcatgcactgggcccaacccagcgtggtctctgccacaaaacccctccaaatgtggaccttcaggaatctctgaataccagatttgcggcattgcatttgactcattagctcactatcttttacaacagcatcttaactgcctttctgcactcatcctgccccacagaggcctttttttttttttttttgagacagagtctcaatctgttgcccaggctggagtgcaatggcgcaatttcggctcgctgcaacctccgcctcccaggttcaagtgattctcctgcctcagcctcccaagtagctgggattacaggcgtgtgccactatgccaggctaatttttttttattttagtagattaggggttttgccatgttggccaggctggtcttgaactcctgacctcaggtgatctgcccacctcggcctcccaaagtgttgggattacaggcatgagccactgtgcccggcctttttttttttattttaaagacagagtgttgccaggcatggtggctcacgtctgtaatcccagcactttgggaggctgaggtgggcagatcacctgaggttgggagttcaagaccagcctgatcaacatggagaaaccttgtctctactaaaactacaaaaactagccgggtctggtggcacatgcctataatcccagctacttgggaggctgaagcaggagaatcacttgaacccaggaggcggaggttgcggtgagcagagatcatgccactgcactccagcgtgggcaacaagagtgaaactccgtctcaaataaataaataaataaataaaataaaataaagacggagtctcactgtgtcacccaggctggagtacagtggtgcgatcacagctcactgcagccttgacctcctgggctaaagtgatcctcccacctcagcctcctgagcagctaggactacagcacactccacagcacccggcccgaggtctcttcttaaaacacaaatcacttttaaggactagataatcttatatgagttgttccaaagaaaagaaaaatagaaaaagaaggcaaggctcattttatgaggctagcaggaccttaattccaaaactagatgaaagtttccagaaacagaaagtaagattatatatcaattgcatatatatgcaaaaactttaaataaaatagaatagatttatccccataaagcaaggatgattcaacataagaaaatctatcagctgggtgtggtggctcatgcctgtaatcccaacactttgggaggctgaggcaggtggatcacctgaggtcaagagttcgaaaccccttctctactgaaaattcaaaaaactagccaggtgtagtggtatgcgcctgtaatcccagctactcaggaggctgggacaggcgaatcgcttgaatctgggaggtagaggttgcagtgagcagagattgcaccattgcactccagcccgggtaacaagagtgaaactctgtctcaaaacaaaaaaacaattaaaactagtaagcaagttcagaaagtggcctgaaacacaaccaactttacaaaaatcaaaacagaaattgtacattgttaatttaatgggttattgttttgagacagggtctcactctgttgcccaggctggagtgcagtggcctgatcaaggctcagtgcagccttgaccttttgggctcaagcaatcctccctgctcagcctcccaagtagctgggactacaggcatatgatgccaccactccctggtaatttttttaaaatagagatagggtcttgctatgttgcccaggctggtctcaaactcctggactcaagcaatcctcctgtctcggcttcccaaagtgctgggattataggtgtgagccatgtggaacaggttgcccagcctaatttaatgttaattatgttaatttcctgcttacaatgccaacagtttcctatcacacacacaaaatccaacaaaactcacactcctttagaggcccttaactgtgtggacttgtggccacttcagcctcacgtctctccaagtcctgctgctactcatacatgggcagttcattttgacttcagagcgtttgcacagcctcttccatcactccccacttctttttttttttcttttgagacggggtctcgctctgttgcccaggctggagtgcaatggcacaatctcagctcactgcaacctctgtcttccgggttcaaatgattctcctgcctcagcctcccaagtagttgggattacaggcacatgccaccatgcctggctgatttttgtagttttagtagagacgaggtttcaccatgatggctaggctggtctcaaactcctgacctcaagtgatccgcctgcctcggcctcccaaactgctgggattacaggcatgagccattgcaccccaccatctctccccacttcatttcaccttttttgcgtggctgactcttatactgtaagactcaagcatcctccacctgaaaggccatactgtctagggtctcatcctcatcccactgcatttcattcccaatggtccaagggtcatgttcacccttaaagccccatcagggaccacagagctcgggacacagtcggtgttcggtaccactgctgactggccaactgaagccacaccctccatacagctccttgatcctgccgccacagatgtacctgcagccaggccctcacctctccgcaggagcctggccgggccccatcctgggcccccagccacagccaggtggtgcagacggcccacctgggtgtctagatccctcttggagcccagctccactgggaagcgcgaaagggctgcgagggcatctgtgggctgcggctcagtcggctcctgggcagggatccgctaggggggtctcatcagggaagggggatgtgaaggactggaactttgggcacaacaaaacaatgaagacagagctggctgggggtcctgggggcgcagtctagacgggaacgggatttaggaggggtctgatgggaagggaggtggctgaatgagaaaagggggtggctctgggagggcgacacaccagaaggtctggggtcgcagggaggctgagagctgagggggatctaaggcaatcgggagtctgggagggggcttagggctggggtcgggcgtgccagggtggcagaagggctgcgaggataggatccgagcttgggaaaggagtcggagggctcaggaggaggctctgaaggctgcggtgggaggatgaggcgcctgtggtttaggatctgagaggcggtgagaggggtcatggggaggctctagggacagcgtctgtggggtccgtggggtggatggggtctgagggcagcgggcgcgctctgaaggaggagagggcgctgatggcaggatctgccgactgtgcgggggtccgcgggtgggacgcgtggactaaggactagggaagtgtctgtgtgttgggggtgggggctacaggctggggaagggggctctgaggacagtgtctggggctggggaaggggtcagtggaatggggaaagggttcgctaaaggggcgggcaggggtgtggtctgagggccgcggaagagaaggacagggtgggaggggcctgagggctgggggaagggtctgagggtgatctgagggcccagaaagctctgggaaagttctgggcccacaccccagtcctggtggctttgcactcaccgttgggctagatagtggtcgccacctgactgccacatgatccggccggctgtatgagcgggaatccgaggtgcttgagcaccagtggcctcccgcagcgcctgcgcagtagcatccccttccccaacacagccccagccactcagcctgggccccacagccctgaccagtcggggctgtcactgtctgaggacggggctgtctacccacaccggactaagccctgtaaggcagggccttgggtcgttcttgtcactgttgtgttcacagcgttgttcaccccagaacctagctcaaaagaggcctcattcagtgcttttattctcactctgtcgcccaggctggcgtgcagtggcgcgatctcggctcactgcaacctgcatctcccaggttcaagcaattctccttcttcagccttccgagtagctgggattacaggcgcacgccaccatgcccggctcatttttgtatttttagtagacacggggtttcaccatgttggccaggctggtctcaatctcctgacttctgcccgcctcggcctcccaaagtgctgggattacaggcatgagccactgcacctggcgtttttctcagacaggatctcactctgttgcccgggctggtgtgcagtggcaagatcatagctcactccagcctccacctccagggctcaagccaacctcctgcctcagcctcccaagtagctgggactacaagcacaggccacccaccacacctagctaatttttttttttttttttaagatggagtcctgctctgtcgccaggctggagtgcagtggcacgatcttggctcactgcaacctccatctcccaggttcaagtgattctcctgcctcagcctcccaagtagctgggattacaggcgagtgccaccacgcctggctaatttttgtatttttagtaaagacagggtttcaccatgttgggcaggatggtttcgatctcttgacctcgtgatccgccggcctcagcctcccaaagtgctgggattacaggtgtgagccacagcacctggctagctaatttctttctttcttttttttttttttttttttttgagagataatggggtttcactatgttgcccaggctggtctcaaactcctgacctcaagcaatccacctgccttggtctcccaaagtgctgggattacaggcatgagtcactgcacctagtttcattcaatgcttattaactgagagaatggcttggctctttcttctgtccctccctcgccaagtggcctgggccgagccccttgacttcagtgccttggtgtctgctccccatgtgtgcccttcctttaggcatcccctgggatgaagaaagttctgcatcagtcactggccagacccaacccaggatggtctgcctcagaggtgagggaggcttccttagtcctccgtcaatgccctggctatgctcaatgggtgtctaacgatcttttttttttttttcttttctttttttttttttttgagactgagtctcactctgttgcccaggctggagtgcagtggcgtgatctcagctcactgcaagctctgcctcctggattcatgccattctcttgcctcagcctcccgagtagctgggactacaggcgcctgccaccacgcccggctattttttgtatttttagcagagacggggtttcaccatgttagctaggatggtctcgatctcctgacctcgttatccacacgcctcggcctcccaaactgctgggattacaggcgtgagccaccgtgcccggcctctttttcttttcttttctttttttttttttaaacacagtctcttgctgtcacccagactggagagcagtggtgcagtcataggtcactgcagcctcaaacccctgggctcaagtgatcctcctgcctcagcctcccgagctgggaccacaggcacgcaccaccatgccctactgatttaattttttgtagagaaagaatattgctatgttgcccaggctggtcttgaactcctagactgaagcacgcctcccacctcggcctcccaaagcgctgggagtataggcgagagctaccactcccagcctaacgatctctcttgaactgcaaaacccctagcttgggctggctgaggtcaagatgagcccttccccaaggaggcggcgtcagtgcaggacagcagcttaggcagcacctaaggacttttattgaccacatgaccccctcaggggtgctagtggggtatccttcggcatcctggcagcagccgccgccacagttcttggctgagcagctcctgttccctgcgggcaccctgaagcacgctccggttctcctgggccctccggatcaggtaggggattacctcctccaaggagccatagggaatggacttatacactacatagccggcctgccctgcagggagagtgggttttgttttttcgtttttggtgtttttctgagacagagtctcgctctgttgcccaggctggagtgcagtggtgcaatctcagctcactgcaagctctgcctccaggttcaagcgattctcatgcctcagcctccagaatggctgggattataggcgcttgccacgacgcccggctcatttttgtatttttagtagagatggggtttcaccatg[137 bp omitted]tccccagtccccacctggaacagagacttctgtttctgagaacatggcagattaagtgagttggataaaatttctaactgaaaaagctaaaagtcctggagcaaacttttttttttctctcttagacagggtctagccctgtggcccaggctggagtgcagtggtgtgatcacgactcactgctgctttgacctcccaggctcaaacaatcctcccacctcagcctcctgaatagctgggaccacaggcatgcacctccacgcccagctaactgtttttattttatctcaattgattaattaattaattaattaattttgagacagagtcttggtctgtcgccctggctggagggcagtggcacaatctcagcacactgaccaacctggccaacatggtgaaaccccgtctctactaaaaatacaaaaattggctgggcatggtggtgcgtgcctataatcccggctactggggaggcggaggcaggagaatcacttgaacccaggaggcggaggttgaagtgagctgagatcgtgccactgcactcaagtctgggcgacagagccagactctgtctcaaaaacaaaataaataagctgggcgtggtggctcacgcctgtaatcccagcaactctgggaggccaaggcaggcagatcacctgaggtcaggagtttgagaccagcctggcaaacatggtaagaccccatctctactaaaaatacaaaaattagctgggcgtggtggcagccgtctgtaatcccagctacttgggaggctgaggcaggagaatcgcttgaacctgggaggcaaaggttgcagtgagccaagatggcaccactggactcctgcctgggtaacagagcaagactctgtctcaaaataaataaataaataaaataaaataaaagagaaaatgagaacccagagagagaagagacacacagcaagccacttctgccccaaaagcaaaaccgaggtgctatctgatgaattcacagagttgcggggggacattgagtcagtcttcaagcctgaggtgagagttataagggagaacttccccaagttaagctggaacccaaaaatctacacccttagagtaagagttaataaaaagtcaaccctgcaaccttcccccagtcccaggaaatggtcttggccataaacagatcaaggaagaaaacagaaaaatccacctctgcgaagttggggctatgggttaacccccttatgtatttgcagctcaaatttgtgccagtggggtgtttcaagaaacctcaagctatgaatttaggataaagtgatttcgttctgcttagcacctggcagaaggaaacattaattacctggtgtcaggccctgaggagcagcacagtaaagataacaaaacacacaagaaataatacaccatgatcaagaaccagcagaaatgacagacggcagacacagagacacagccttggaaggcccacagacactggaatgacagatctctctggaaggatctggaggctgggccttggttgggaataggagaagggctctggctgggagggagtaaggcctggggcttgatgggggtgggggagccattcacatacccagtgctagagagacgtggtcacacatgcccagaagttgtccgaaacagacagtcccatccagaggaatgcccagctcccacatgctacagaaaaggccacatcatcagtccagactgtggctgcatctacagcttaaagtcagccactatgcacccatatggcggctccagtaattcaaacattgaagtatttccaaactcaatgatacataataaccagtcctttgcattccttgaaggtcccccagtgactcccagccagttccctggagccctcagacctcctcatgccccagcaaataaggggcaacgtcttgtccatctgggacctataaggacttacaggtatagcaggggttaatgtgtttgtttgtttgtttgttttaagaggtagggacttgctttgttacccaggctggagtgcagtggctcaagcactgctcactgcagtctcaacctcttgggctcaagtgatccttccacctccggaatagctgggactacaggtgtgcgccaccacacccagctgtttttttttttttaatttgttgtagaaatggggtcttgctgtgttgcccaggctggtctcaaacaatcctccaccttcgcctcccaaagtgttgggattataggcatgtgccaaccatgcctggctataaatatttttaaaattctccccagaacacctctgtccatctctggcatttgagcaaaggagaggaagggagggcccttttgtgggcacctatttcccgcccatccctccacctcataccgcttggttgcctggcgaacagattcctcattgtgggaagccaccatgaggtggcacatggggccatggcgggccacgtgcgtcagcatcagttccaggcagcggctgtaactgaagggagatgctctgttcagctcacctggtgagcgagggtcaggccccagcgactggggtgggtggggtgctcctaagcaaggggtctctggaaccagtactctgttccatctgcaccagttgtaagggacatcacttctctgagccactttcatcttctggggttttttgggggttttgtttgtttgtttttgagatggagtcactctgttgcccaggctggaatgcagtggcatgatctcagctcactgcaacctccacctcccaggttcaagggattctcctgcctcagcctcccgagcagctgggattacaggcgtgcaccatcacacccggctaatttttgtatttttagtagagacggagtttcgccatgttgcccaggctggactcgaactcctgacctcaggtgatctgcccgcctcagcctcccagagtgctgggattacaggcgtgagccaccgcacccggccccatgttaatctcttgtcactgtgagtttccgagcaacactgttgtgaggatggagtgagataagggggatatgaagtctttgggacagtggcggcggtctcacaggagagggtcgcatcacatgcacaagatgacatttccccaaggttatcactgctgcattgtcaacagaacatcactagcaacagcccaaatgtccataaatggggaactggctaaggaaattgtggtacagagaagatagtgctctatcgcgcaactgtgaaaaggaaggaagacactgtctgggtactgatatggaagaggaaatagattggcaaacaccttgcaagcatgctgcaggccacgggccacgctatgtatttcacatcctctgtgggtcttccctatcgccccccagacctgttttctacccttctctgcccctcaggaagctgacacttttgccccacatcccccatggagtcatgtgcaggaaggagtgtgggtgtctcacctcggcccctccctgctcaccctgactgtgttctgtgtgtggccacagctccctaaggtggcccctctccttcaactacagcataggggtcaaaatagcttcctaatagcttccctgactttgcccacacttccttttcgttttgtgttttttagagactgggtctcactctgttgcccaggttggagtgcagtggcgtgatctcggctcacggaatcctccaactcctgggctcaagcgatcctcccaccttgggctcccaaagtgctgggattacaggtgtgaggccctgcacctggcccctgacacttctataaacagcctcttcaccacatttcctttagttaaaaccctttgtgcagaattctgtttgctttggagaaagctaatcactcatctaattcccacatcaactctgggaggcagatgttcttattccattttaacagagtggggagactgaagctgagaggggttctatctcttgtccccaggtcacacagctagaggtggccaggctgggatttgaactcaggctgtctgatgctccagagcccaggctccttatcggtaggctagtctgcctttaaaatgcacagttgtggctggacatgctggcttacgcctataatcccagcacttggggaggccaaggcaggagggctgcttcagcctaggagttcaagactagcctgggcaacatagggagaccccgtgtctacaaaaataaaaaaatgtgttgggtatggtggtgtgcgctggtggtcttagctactggggagactgaggtgggaggatggcttgggcctggggagtcaaggctgcagtgagccaagatcgcaccactgcactccagcctgggcgacagagtgagaccctgtctcaaaaataacttaaaaaacaaatgaaaaaagccaaatatacaagggcacatattgtatgattccatttataagattgtctagaataggcaaatccacagagacaaaaagtaggttagtggtttccaggggctgaggggaggagggaacagaaggcagctgactgctcattggtatgaggttactttttggggtgatgaaaatattgtggaatcaaagagtggtgatggttgcacaattttgggaatatactaaactccactgaattgtacatgttaaaattgtgaattctatgatacgtgaattatatttcaatatttaaaataatagtgcaaattattattattattttgagatggagtctcactctgtcgcccaggctggagtgtagtggctcaatcttggctcactacaacctttgcctcctgggttcaagtgattctccttcctcagcctcccaagtagctgggattaccagtgcaagccaccacacccggctaatttttgtatttttagtagagacagggtttcaccatgtttgtcaggctggtctcaaactcctgacctcaggtgatctgcctgcctcagcctcccaaagtgccgggattacaagcgtgagccaccatgcccggccataattttttgtgtttaatgttttttacagatggggtcttgctatgttgtgcagattgggctcaaacccctgggctcaagcaatcttcctgcctcagcctcccaagtagttgggatgacaggtgcacaccactgtgcctggcttggtgccagttaagctgatggtacacaaacgtgccctggagcccctgcagatcttggacatgagcctggattccaagcgtggctaggccacctgctctgtagcctggctgagtccctgtggcccccagagaaggtaccaagaagtaaagatctaaggaggtgagggatggggccatgccactgtctgcagtgggaatgtcccaggcagtggaaacaggatgtgccaagcccctgggtaacatggaggaggccagtgtggctgtagtggagtgagggagaggaagagagggagggaaagttagggaagtgacagggagcatgtggggcttagaggccactgtaaggatttctttttgttttgttttgtttgtttgtttgtttgtttgtttgttttgagacagattctcgctctgctgcccaggctgaagtgcagtggtgcagtcatggctcactgcagccttgaactcctggcctcaagtgatcctcccacctcagcctcctaagtggctggaaccacaggcatgtgctaccacacctgactatttttaaaattttttagagatggggtctccctgtgttgcccaggctggtctccaactcctgctctcaagtgaatctctagcctcagcctcccaaagcactgggattacaggtatgagccactgcacccaaccactaggtgttattatttcctgcagaggccagctggcccgggcctacctctgactggtggcctcatagtcaggctgagtggggtcttccatcccatggagctgggccaccgctctctccttgtccagatatgcacctcgtaccagcttcactccgaaggccaggccggccctgtgcgcagcctctgcatccctccccagccgctcgaatgtgtcctatagggcacgcaggcaggttctggtaggtcagggtgtggggaccccagcctgtacctcctggaacacactgcacacctttagacaggcctggtaggtgttccacacccagggcccgccttcacccgggctgttccagcgcacagccagggcagccaccagcagcgagagcgcagggttcagtgaggtgtactccgcatccaccaggagccgcacgtgctgggcccgggcatactgatggcgacagagacgacggtcagggccccgggtgtccagcaggggcagtggagccagatcccagcaggaggggttacctgtgccacccgatgcaggcggctgagggaggcccggaggtgctggttccagcaggaggggttacctgtgccacccaatgcaggcggcagagggaggcccggaggtgctggttccagcaggaggggttacctgtgccacccgatgcaggcggctgagggaggcccggaggtgctggttctgctcagcattgaggcaggagacctggaggttctagggggcagcaggggaagtggggaaaagcttataagttgctagaaatctaaaaatgagcaatatcagttaggtactatttattgagggggttatgagcctagaatcagggctcgaatccaggcttcaccacctactgtgtgaccttgggcaagttatgtaacctttctgggcctcagtttttgtttgtttgttttttgaaacagagtcttgctctgttgcccaggctggagtgcagtggcatgatctcagctcactgcaacctctgcctcctgggttcaagtgattctcctgcttcagcctcccgagtagctgggattacaggcgcccgccaccatgcccggctaatatttgtacttttagtagagacagggtttaaccatgttggccaggctggtctcgaactcctgacctcaagtgatctgcccacatcggcctcccaaagtgctgggattacaggtgtgagccaccgtgctcagccctccctgctactctttgaacacgagggcaccttcccacctccagccctttacctgctcccatgtttccttcaagtatttgctctaatgtcactttctcaacatggttttcccacctatacattggcaacttcttttcctcttcctcagccttattttcccttacttgttacgtactgacttttgttttgctgagacggggtcttgctgtgttgcccaggctggaatgcagtggcacgatcatggctcactgcagcctccacctccccagctcaagcaatcctcctgcttcagccttccaagtacctagtaccacaggcacccaccaccatgccgggctaattctttactatttgtagagtcaaggtcttcctatgttgcccaggctggtctcagtctcctggactcaagcgatcctcccacctcagccttccaaagtgctgggattctgactttggttttaattattgtctcttgcccctgacttgcaagtaagtgcctcgaggtcagggattttgccttcatgcttcctcggcccctagcaccgtgtctggaacaagatagatgttcagcaaacacttcgggagtggatatgcttgtaacatggaaataagaaccgtttctaactcacagtcttatgcagattcatctggctgaatgtgagctgctggtgactccagggagtctggctgggttcaaagaagttgggaaatggaagaaagaggaacaggtggggctgaaagctttattatatccaacagggtcgatacagatgacataggcctgggcttgctcatggaatcccacctggaggcaggttgggctggaagctgcaaccttccgcatggtggggagaatgctgcctcctggagaagggaagacctggaggcagcagcctggtttcctcctcccctgtcagaggattgtctcctgcttgacttggggcgtagtcttaggccctcagggagctatttcagacacccaccaaatatttaactcatttaatatttaccactctctaatgtaccaactgttattatccccccattttctagatggggaaactgaggcacagagcagggaagtcacttgtcaaaagtcacacagctaactcagggcagacctgaggtttaaacctcagcctttccagagcctgggtctttctctcttttctccctccctccctccttccctcccttccttccttccttcttttttttttttttttgagatagatctcactctgtctcccaggcaagagtgcagtggtgcaagttcaagtgattcccctgcctcagcctcctgattaactggggctacaggcacgtgccaccacttctggataagttttatatttttagtagagatggggtttcaccatgttgcccaggctggtctcaaactcctgacctcaagtgatccagccccacttagcctcccaaagtgctgggattacaggtgtgagctacagcacctggcccttttttctttctttctttatttctttcttccttccttccttccttcctttccttccttccttccttcctccctccctctctttctttcttcgctctcaaacttgccagctcaagcaatcctcccaccttagcctcccaagtagccaggattacaggtgcctgccaccacacccagctaatttaaaggaattttttgtagagatgagggtttactatattactcaggttggtattgacctcctgggctcaagcgaccctcctgccttagcctccacaccaggtgtgcaccagcacacaggctgattttttaatttttttgtagagatgagatctcactatgttgcccaggcaggtctcaaactcctgggctcaagtgagcctccaatttcagcctcccaaaatgcagattacaggcatgaggcactgcacccagcctgttttaatccttaaaaccactgagaagttgctgtcactctccctacaggaataaactaaagctcatgaagaggtgaactccttactctccaaagctgattttctgaaccatgaaatcttgtttctatgtgttctctgacacactttaaaaattacaaataaggccaggtacagtggctcatgcctgtaatcccagcactttgggaggccgaggcacgtggatcacgaggtcaggagttaaagactagcctggccaacatagtgaaaccccatctctactaaaaatacaaaacttagctgggtgtggtggtgtgcgcctgtagccccagctactcaggaggctggggcaggagaatcgtttgaacccgggaggcggaggttgcagtgagccgagatcgcaccactgcactccagcctgggcaacagagc[141 bp omitted]gtgaagcctcatccctactaaaaatacaaaaattagccaggtgtaatggcaggcgcttgtaatcccagctactcgggaggctgaagcaggagaacccgggaggcggaggtcgcagtgagcagagattgcgccactgcactccagcctgggcaacagagcaagactctgtcttaaaataataataataataataataataataataaataaatagataaacaaataaaaattacaaataaaaaaaggttagaaaaagaaacatcagcatgtccactatagcattgtttgggagggtggagacacagaggccacccaggggttcaccccaggagaggtaaaccatgcagcagctagaatcaactattggaaacagtgggggccgggcatggtggctcagcccataatcccaacaatttgggagggtgaggcaagaagaatttttttttttttttttgagacggagtcttactctgtcaccaggctggagtgcagtggcacgatctcggtttactgcaacctccgcctcccggttcaagcgattctcctgcctcagcctcccaagtaactgggactacaggtgtgtgccaccacgtccagataatttttgtatttctagtagagacggagttttac[140 bp omitted]tgtgtattggttaaggttcatcaaagggcacatttacaatgtgtgtagttcattgttttaccttgaaagaaaaaaagtactgcgaataattattgggctctaattaatgagcccattattcatatcctgaagcatttagggggaaaacatgtctgcaatttactttgaaatgcaccaaaaaataagatggattgatggatggatagaggaatagagggatagatatgatttaaagtgagtatagttaaaggtggcgggggcatggatgttcatgtacaattctttttacttttctgtatatttgaaaatttttataatagaatattggggaaaatatgccccccacgaatggtatacacctggcaaaacaaaatcatagaaacaaaaagatatgcattatacaagacggcaggctgggtgtggtggctcacacctataatcccagaactttggggggctgaggctgggggattgcttgaggccatgagttagagaccaccctgtgcaatacagtaagacaaagagaaagagagagagagagagagaggagggaggagagagaaggaaggaaggaaggaataaaggaaggaaggaaggaagggagggagggagggaggggagagaaggaaaaagaaaagaaggaaggaaggagagagagcaaaagaggaagaggaaggaaggagagagagagaaagaaagaaaaaaagatggagtagggttgaaagagaatgtggagataaaaaggaattaatgattgaatgaacaaactaagaccccattggcctaatcagaacttacacccagccagctcacacccatgcagctgtgttgactgagaacacactgatgtacctccttctaattgataaacagcttctatcccaatccctcctctgagagcctccagcctccaggctcctccctgagaacccagatgaccctgattccatccatttcaaccatgcctgggagctacagctgcacttctgctggctgttccaagcctggaggtggccgtagcattttgaacatctggcgtgcggtgtggccgcatctaagtccaaggcactctgtccccgacagtcccgcttgagatccttacctgcccagagtccatagcttcagccagcctctcggggctcagctccaaggaggctcctggccttctgacccacgaggctagctccttctgaaatggggtggtaggcggggtggtgaggggagcccgatgggcagccgcgccctccccgcacccccgtctttgcactccttacacagagccgagtactggtcagcgccgtcaccttcagctgcatgaggctggcctcagccaggctggggggctccaggaggccccgtgacaggtccacacaccgcagcatagcaccgaggttcccctcataccacgcctcactgcccagccagcaggtgtcagggcccgaacagcaaagccccttcctgcgtcctcccagcctccctgggccctggctccctactcacccactcttggcagcagagtccggctcctcctcagtgggcactgccagcagtggtcggaggctgagggtccgcagctgctgcacgcagcccttcacctcctctgctgtctcaccagccacaaactgcccatagacggatgctcggagaaatgcgcctgagagccgggagcccaggagtcgccgagaccaggcctggagctgggtgacagggagcgagggctcagcgccaggctatgaggagcctccaggctggtcctcaggatcactgctcaccaacagcccgtgagtgacgagtgggggccaggcacacagccggagaaccagcaaggcccgtgtcagctctcctgtgcccttaaggtggaaggccccgccatcaaagctcagggactgccagcccctggaggggggaccagcttgggaacagagcacgtaacaggtccggagcatcctgggtccctggctgcctccacaccagggaaggttctctggaggcagcaagttcaccaactgccccttgcccagaccaggggcagtgactgattaactgggcaaagcctcaggatcacaggctccttgggggcaattaattattaacaaatggggacagagttcagagtaacggaaacgggaggtgaaccccagtaacagcccccaagaatgctcagcacaacagcctgcacttattaggtaaccaccatgtgctggggaaagcaggggctccggagcaaggatccctgggctcaggacaccgggctttgtgatccaggacaggctacttaatcacttttgtggcaattgcttcctcttaaaattggaaacgctgtagtgttattgaatacatttgaaaatacggttctcacgtttgtaatcccaacactttgggaggccaagaccgaggagtttgagactaccctgggcgacatagtgagaccccatctctacaaaaaatacaaaaattaactgtgtgtggtggcacacacctgtggtcctagctactcaggaggccgaggaaggtggatctcttgagcctgggaggtcaagggtgcagtgagctgtgattgtgccactgcactccaccctgggtgacaaagtgagactctgtcgccaaaaaaagaaaaaagaaaagacaaataacctatataacccagctgttccatgctaagtacatatcctagagaccttaaacatggacagcaggaaacatgtacaggaaagaatgttcagaggagcagtgtctgaactacccaaatgtccatcaaaaggagaatggatacatatatggtggtgtagttatgcaatggaatactatacagtaatgaaaaagaatggatactgatacacacaactgtgtggctgaatctcacaatgtcaagtgaaagaagccagacaccaaacagggcaagctgtattattcttttttttttttttttttttttttttttgagacacagtttcactcttgttgcccaggctagagtgcaatggcacaatctcagctcactgcaaccttcaccccccgggttcaagcgattctcttgcctcagcttccagagtagctgggattacaggcatgtgccaccacgccccactaattttgtatttttagtagagacagggtttctccatgttggtcagactggtcttgaactcccgacctcaggtgatctgcccgcctcagccttccaaagtgctgggattacaggcatgagccactgtggctggtctatacttttcaataaatataaaagcaaggaaagtgaaactgcagtaaaatgttgggaatacatgcgtgggtggtcaaactatgaggacaagaaaagtaaggacatgattatcacagaagtcagagaggtggttgattgtgggggatgggaggaattgtaatggggtagagggatatggggacttctatatcctattttctttttttaaaatggaaaccatatgtcttaatttttttgttttgttttgttagacgtatccttgctctgtcacccaggctggagtgcagtggtgcgatctcggctcactgcaacccccatctcccgggttcaagtgattcttctgctttagccccctgagtagctgggactacaggcacccaccaccacacctggctaatttttgtatttttgtagatatggggtttcaccatgttggccaggctggtcttgagctcctgacctcaagtgatccaccctacttgtcctcccaacatgctgggattacaggcgtgaagtcctaggtctttttttttttttttttttttttttgagacagagtcttactctgttgcccaggctggagtgcagtggcacgatctcggctcactacagcctctgcccccgggttcaagcaattatcctgcctcagcctcccgagtagctaggattacaggcgtctgccaccgcgcctggctaacttttgtgtttttagtagagtcacggtttcaccatcttggccaggctggtcttgaactcctgacctcatgatccacctgccttggcctcccaaagtgctgggattacaggtgtgagccactgtgcctggcagtggcttctaggtcctaggagtcctaggtcttaacatggatgatgattcatagttgttcacattgtaaggttttttttgttttgtttttgagacagagtcttgctctgtcttccaggctggagtgcagtggggtgatcactgctcactgcagcctcaaacttctgggctcaagcaatccccccacccaccacctccacctcccaagtagctgggattacaggtgcatgtgatcacaccgagggtaatttttaattgtttttttggtagagacagagtcttactatgctgcctaggctggtcttgaacccctggactcaagcagtcctctcaccttgggcctcccaaagtgttgggatttcaggcatgagccacggcacctggccctcacattgtaagttttttttttttgagacggagtcttgctctgtcccccaggctggagtgcagtggcgcaatcttggctcactgcaagctccgcctcctgagttcatgccattctcctgcctcagcctcccgagtagctgggactacaggcacccaccaccacgcccggctaattttttgtatttttagtagagacggggttttaccatgttagccaggatggtctcaatctcctgacctcgtgatccacccgcctcggcttcccaaactgctgggattacaggcgtgagccacactgcgcccggccttgaaatttttatttattttcttatttatgtatgtatgtatgtatgtatgtgtgtatttatttatttattcatttttgagacagggtctcactctgttgcccaggctggagtgcagtggcacaatttcggctcactgcagcctcaacctcccaggctcaggtgatcctcccacctctgcctcccaagtagctgggactataggcacatgccactatgcccagctaaatttaaaaaaatttttttttcctttcttttttgtgatgggggatctcactctgtcacccaggctggaatgctccagcatgatcatggctcactacagcctcaaactcctaggctcaaacaatcctcctaccttggcctcccaaacgctaagcttataggcatgagcctctgtacttggcctgccttttttttcttttctttttttttttggctccatcttgctctgttgcctaggctgcagatgtctgctcactgcaacctccgcctcccaggttcaagtgattctcctgcctcagcctcccaagtagctgggattacaggtgtctgctaccatgcccggctaatttttgtacttttaggagaggcggggtttcaccatattaaccaggctggtcttgaactcctggcctcagatgatccgcctaccttggcctcccaacgtgctgggattacagacgtgagccaccacgcccagcctagggcctcatccccagaaatgtgattactgggtaggcattggggtgttgaaagctcccctggtggttcaaatgttcacccaggtgaagaggcacggcccctacaatcggacaccttagcctctctaaatggggtcctccctccctctttgtcttttcactgtccctggaacacacccagcttcctgctgttgcatttccgctgttccttttccctgaaaactccacccttccttctttccctaattaactcccacctgccctcaggtgtcagggtttaagacaccccctcaaggaggtctgccttgagcagcccctcccagatgagggggagttttaccctttcacattttaacaccagccttgtagctcttgtcatgtttattcgtctgtgagtgaagactcagtttctctccccacgcccctgctagactgtgaacaccatgaggtcggggggtcacatttggttttgtcattaatttatccctactgcttaacacaggacttatttttgttgaatggacttatttttgttgaatgggtaactaatttaatagatttctttggtatttgctggacaagggacttatagattgcatcacatcaattcaagcagattctggataagacccacctttttttttttttttttttttgagacagggtctcactctgtcgcccaggctggagtgcacaatgtcggctcactgaaacctccacctcccgcattcaagcatgctcctgcctcaggctcccgagtagctgtgattacagttgcaggccatgaggcacacgccaccatgcccggctaatttgtgtgtgtgtgtgtgttttttttttttttaagtagagacaggtatttcacattgttggccaggttggtctcaaactcctgaccttgtgatccgcccgcctcggcctcccaaagttctgggattacaggtgtgagccaccgcgcccggcctcgaagtttttttgtttttttttttttaatgagacatagtcttgctctgtcaccagctggaatgcacggcgcgatctcggctcactgcaacctctgcctcctgggttcaagcgattctccacctctgcctcccaagtagctgggactacaggcgcacaccgccacgcccagctaattttttgtattcttttagtagagatggggtttcaccatgttggccaggctggtctcgaactcctgagctcaggcaatccgcctgcctcgacctcccaaacatggccttgggaatcgccatgtttgggtggacccagttgggtggcctgcatttgcatattaaa[134 bp omitted]gtgaaactccgcctctactaaaaatacaaaaattagccgggcgtgatggcgcgtgcctgtaatcccaactactcaggaggctgaggcaggataatcgcttgaaccggggaggtggaagttacagtgagccgagatggcgctattgcactccagcctgggcaacagagtgagactccgtctcaagaaaaaaaaaaaaaaaaaaaggtagaaattagagagtatagaagagaggcaatcttggaagaaataatggctgagaattttccagaactgatgaaaaatacatattcacaaagaagcaaagatatcttaagctagataaaacaaaagaggccgggtgtggtggctcgtacctgtaatcccaacactttgggaggctgaggcgggcagatcacgaggtcaggagttcgagaccagcccggccaaatggtgaaaacctgcctctactaaaaatacaaaaattagttgggcgtggtggcacgtgctggtaatcccagctactcgggaggctgaggcagaagaatccctcgaacctgggaggcagaggttgcagtgagctgagatcgcccattgcactccagccttggtgacagagtgagactccatctcaaaacaaacaaacaagcaaacaaacaaacaaacactaaagaaatccatgcctaaacacatcatactgaaatggcagagcattgaagctaccgaggtctattatttatctttgcatcctccagagtgtagcctggactagatgctccaccaattcaattacatcaagagggtgggtatcccaggttgagaccacagacaaattaaaggcaaggaggtagaaacaaatatggctataagaaggaaaagcatttttctcacctatctgaggcacacaacctggattgggggaaagtgaagttgaaaatgagagtgtgggagagggagagactaggtggagagaatttttgtttcgttttgttttagagacagggtcctgttctgtcacccaggctgtagtacagtggtgtgatcgatcatagctctcatagctcactgcagctttgaactactgggctcaagggatcctcctgcctcagtctcccgagttgctgggactacaggagtgtggcaccacagctgggtaatttttgtgttttttgtagagatggggtctctctgtgctgcctgggctggtctggaactcctggtctcaggtggtcctcctgtctcagcctcccaaagtgcttggattacagacatgagccacccacacctggtcactggggaatcctgagtgccctgcaaaacagaacacaatgggctgctcaacagtagccatggaaggttctggaataaagttcccagccggtccttctgtgggtgattgtccattttgtggtaagaggcaaaggggctctaacaccagcagagaggcagagccataggtgggagagtccctcttattctctctggttgggtcaccaggtgaccccataccaatcactgggattgaagaataaggtattccagccagctccagtgctgtgcctgtttctggagcttcaagagtgctcaaccaatgcacaaaacctacctggggcgtggtggctcatgcctgcagtaccagcactttgggaggccgtggcgggtggatcacctgaggtcaggagtttgagaccagcctggccaacatggcgaaacctcttctctactaaaaatacaaaaactagctgggggtggtggcaggcgcctgtaatcccagctaccgggaggctgaggcataagaatcgcttgaacccgggaggtggaggttgcagtgagccaagatcgcataactgcactccagcagcaacacaggtgcactctctctctaaataaacaaataattaaaaacaaaatgaaacaaaaaactggactcatgcgtgactctgatggttccaggaggtgatacatatacagaacatagaatgtgagctggcatgtgttaggagctcataaatgctgtctgtcactgctgctgcagcgactcattggcttcctgtcacccacaggataaagcacaaacccataagatgagctttgtggtttatctttggccatctcactagccttaattcctaccactccctgacttgggggttattctccagcaacaattttagggaaatcccttcccacactgtgctcctggagtcttctttgtctccagcccctgcacagctacttatcccttaatactggagtttggtgacagcttaggagcagaggacagtccagccagttttaatctccagcacagacctctctcctgagctctggaacccaatgtacacacacacacacacacacacacacacacacacacacacacacacacacacatgctcattcagaatcccctcatggattggttcttctcaaacgggacacgaccgcaccctggtgggagcttgggaaatttgcataattgtttttggctgcagcattgattggagggcattacaggcatctagaggcaggaccaggaatgctggacgctgaaatctgcatccagaacagtttgtaaatgtctttgcaggcgcttctgtgcgtaaaataagtttacagttatctgaaattattaatataacacatataccatacacacaaaattttggtatggtttaaaatatattgacattttctgaaatgaaactatgatgtaaatttatttttatttatctattttttttggagacagaatctcgctctgttgctcaggctggagtgcagtggtgccatctcaactcactagaacctctgcctcccgggttccagtgattcttctgcctcagcctcccaagtagctgggtttacaggcctgtgccaccacgcccagctaattttttgtatttttaatagagagggagtttcaccatgttggccaggctggtctcaaattcctgacctcaagtgatcctcctgccttggcctcccaaagtactgggattacaggcgtgagccactgtgcccggcttctgatgtaaagaaagtgaaaattgtgtacttttttgttcagaatggcaccaatggttatacatcatatcagaagaatcacaattccaacaatgccacctatgagatgtaatgtaaaattctgaatgaagtatagcacacataaagaaatgtgcccatatcatgtgttcagtatgaattttcaggaagtgaccagaaagtaaatttgacgcaagtgacacttgaataactaacacccaagtcaagaaaacaacttcgtaatcccagcacttcgggaggccaaggcaggaggatcgcttgggcccaacctggacaacatagtgaaactctgtctctacaaagataaaaaattagccatgtgtggtggtgcacacttgtagtcccagctacacaggaggctgaggtgggaggatcgcttgagcccaagagttggaggctgcagtgagccatcatcacaccactgcactccagcctgggagacagagcaagacaccatatcaaaaaaaaaaaaaaaaaaaaaaagaaagaaagaaaagaaaacaacattatgaggattctcaccccaagccttcctggtgccagtttcaatcaccatccccctctctcccaaaggtaaccagactctttgtttgtttgttgagacagggtctggctctgttgcccaagctggagtgcagtggtgtgatgatggctcactgcagccttgaattcctgggctcaagcaatcctcccacctcagcctcctgagtacttgaggctaccgttgcacaccaccatgtccagctaatttttgtattattttgtagaaacagggtttcaccattttacccaggctggtctcaaactcctggtctcaagcaatctacacatcttggcctcccaaagtgctgggattacaggcatgagccccggctcaggttatgcacttttatagtcagtagtattagtaacatgtggttgtatccttctcagtaatttttttttttttttgagacagagtctcgctccgtcgcccaggctggagtgcagtggcacggtgtcggctcactgcagcctccgcctcctgggttcaagcctcctgagtagctgggattacaggcacgtgccaccactctcagctaatttttatatttttagtagacacagggtttcacatgttggtcaggctggtcttgaactcctgacctgaggtgatctgctcacctctgcctcccaaggtgctgggattacaggtatgagccaccacgcctggccccttctcagtattttatatcagggggctccttgtgtcagtttgtcccatgactggtagcatcaactttgatcatctggtgaaggtgacatctgtcaggtttatccactgtgaaattactatttttccccaagtaactaatgcaatacatgctttttaggctctactaatttgagtttccaccccttgcaaattatttatttcctcctcagttaactaaagacctcattcaaactggtttaagagtgaaggacatttaggccgggcgcggtggctcacgcctggtaatcccagcactttgggaggccaaggagggcggatcacaaggtcaggagatcgagaccatcctggccaacacggtgaaaccccgtctctactaaaaatacaaaaaattagccgggcgaggtgacaggtgcctgtagtcccagctacgtgggaggctgaggcaggagaatggcatgaaccctggggcgcggagcctgcagtgagccgagatcgcgccactgcactccagcctgagtgacagcgagactccgtctcaaaaaaaaaaaaaaaaaaaaaagagtgaaggacatttatggttgcaactaactgaaaatgacattcagactgacctaagtggggagggaaactggtagtctagaagtagccctgacttcaggtgtggctggatccagtggcttggtacaactaggcatttgtcttgttcatcaatatctgtatagattaagggggactagatccggggaaggcagaagcaatagatgtccgctacactgaatcagaaaaaggagaggaggaagtaggaactgcatgaagagacccagccacagcctgcggttactttggagagcttcttccaagtggttcatggtgctgagcaacccaggacctggcttagcagcatattccttggccacagtggttggttccaggacaggcataagacccagcctgggctgatgaaagacagccccagagctttccagaactattggcataaagaggcactctggctgctgagctcatgggataccagcctagaactacaagtggtcttctctgtttcccaaataaagggtctacccgagaatgaagctagaccttgcatggctatgtttcaatactaggtctggcagtgtctgaagccaacgctaccccctgcaattgtcagctgcaagagccaacaaatttcct[131 bp omitted]ggccaacatggcaaaaccccatctctactaaaaatacaaaaattaattgggcgtggtggcgcacacctgtaatcccagctatgcgggaggctgaggcaagagaatctcttgaaccaggaggcagaggatgcagtgagccgaaataacgccactgcactccaacctggactacagagtgagactctgtctcaaaaaaataaaataaaaaagaataaaaatacaaaaattatctgggtgtggtggcatacacctgtagtcccatctacttgggaggctgaggttcaaaaattgcttgaacccaggaggcaggggttgcagtgagccaagatcgtgccactgaactccagcctaggtgacagagataaactgtgtctcaaaaaaaaaaaaaaaaaaaaaaaggctgggcacagtggctcacacctgtaatcccagcactttgggaggccgaggcgggcggatcacaaggtcaggagttcgagaccagcctgaccaacatggtgaaaccccgtctctactaaaaatacaaaaagttagctaggcgtggtggtgggcgcctgtagtcccagctactcgggaggctggggcaggagaatcacttgaaacaaggaggcagaggatgcaataagccgagatcgtgccactgtattcgcagcctgggtgacaaagtgagactctgtctcaaaaaaataaaaataggccaggcgcagtggctcatgcctgtaatcccagcactttgggaggccgaggcgggcggaccacttgaggtcaggagttcgaaaccagcctggccaacatggtgaaaccccgtctctactaaaatatacaaaaattagccaggcgtgatggcaggcgacttaatcccagctacttgggaggcagaggcaagagaaccgtttcaacctgggaggcagacgttgcagtgagcagagttcgagccattgcactcaaacctgggggataagagcaagacttctctcaaaataataataataataataataataataataataataaaaaataaaaacaaaaataaaaaataaaaattaaaaaagaatgttgtaggttttttctttgaaaaggaaaaatatacaattacatgttgttggctgtggatttatttgaaacaaaaagaaaaaatatacaattagaaaaattctactgttagaaatgaagtcaccttttaattacagggaaatcatttagatcttaatgtgtttatgtattccagtgctgtggtgtaaaaacttattttagtctgtgctgataaaaaataacattgtcatacaacaattggggtgtatttgtaaaaaagaaaacaaaagaaaaataaatatattgacaaacacgtgaactagaaagttttgataatatggttaatcaagtagaagtgtggtctgaagaaagtctgttcttcatggaaacaggtgggcttctcagctatcctgctattcaatagaaagatggagccaggcgtggtggctcacgcacacctgtaatctcagcactttgggaggctgaggcgggtggatcacttgaggccaggagtttgagaccagcctggctaacatggttgaaaccccatctctactaaaaatacaaaaaattagccgagcctggtggcggccgcctgcaatcccagctactagggaggctgaggcaagagaattacttgaacctgggaggtggaggttgcagtgagctgagatcgtgccattgcactcctgggtgacaaagcgagacaagaaaggaagggaagagaagggaacgggaggggaggggaggggaggtaaggggaggggagggaaggggaggggaggggagggaaggggaggggaggggagaggagggaaggggaggggaggggagagaagggaagggcagcggaggggagagaagggaagggaagggcaggggaggggaggggagggaaggggaaagagagagagagagacagagacagagagagagagaaagacaggaaagaaaagaaggaaggaagggagggagggagggagggatcctcttactgggctgttattatgaagcctgtttttaaaatcacttttattgagatatcatttatgtacaataaaaatgcacccatcttaagtgtaaagttcaatgagttttgacaaatctgtgcacccgtgcaaccaccaccacaatcgttatatagaatatttccaacacctcagaaagttctcccatgcctttttgcagtcaaccctcctctcatggccccaggaaacctctgctgtgctctctgccaccgtagattagttttgcctattttagaatttctataaacgaaagcacacacacagtacatattcttttcctctagcttcttttgattgtctgtttattttaatgcttatggagcatacttatgtttacatgtgtcatagtttatgcctcctgtgttagataactgtcggaaataataaaataataggtaggatgcaacatggattcataaattccacttattattagctatttcagacgtcatggaatgcaaaatgaacagagtttttcatatgtctttccccacttctgaaaactttacttcatgaagcacttagggaccctcagaatagcattttattttttatttttattttatttttattttttgagacagaatctcgctctgtcgcccaggctggagtgcagtggcgtgatctcagctcactgcaacctccgcctcctgggttcaagcaattctcatgcatcagcctcccaagtagctgggactacaggcatgcgccactactcctggctaattttttatatttttagtagaaatggagttttaccatgttggccaggctggtctcgaactcctgacctcaggtgatccacccgcctcagcctcccaaagtgctgggattataggcgtgagtcaccgcacccggcagcatttcatttttgagacgacgtttacaatctgccctgtccttttggagaagtttagtttctaaagccaaccccaggatgcaccttgtttctactctggtaccagctgaaccatctctgtcactcagccccctccatgtcctctcctgacaccaagtccctttgggttttatggagctcacctaaccagctcggcccaggctgtaatgagagagaccagtggagtgtaaattcctgcaggtgcaggacaatggggttgagagggctcttacaccagatgtcccctcagctcgaagggcagagaatcgggttccagagtgtccaagtctccggccacctggtcatagattcctcttggatcctgatatgtgtcttcaggccagtggaggtcccagggtccctgacaggcaaaaagtggagttagaaccatggagagatgccctgtaggtcttcattgaagatctgggggatacatgcccctgcttaacttcccagaaaaaagtgttttagcttttactaaaatcccaacatatacaaaaaaggagtgtgattataatgaatgcttatgatgaaccccatgtgcttatcacctaacttcaacaatatcaggctgggcacggtagctcatgcctataattccagcactttgggatgccaaagcaggaggattgcttgagaccaggagttcgagaccagcctgggcaacatagtgagatcctgtatctacaaaaaataattttatttttcttagacagggtctggctctgtcacccaggctggagtgcaatggcacgatcttagctccctgcaacctccaccttctgggctcaatccatcctcccacttcagcctcccaagtagctgggactacaggcatgcatcaccacacccagctaacttttgaattttttttttttttaaagacgagg[131 bp omitted]taaagaaattagctaggtgtggtggtgagcgcctatagtcctagatactcaggaggctgaggtaagaggatcgcttgagccccggaggtcaaggctgcagtaagccatgatcatgccactgcactcccgcctgggtgacagactgagactatctcaaaaaaagaaaaaaagaaaaaagaaaaaaccagtagcaacccttggtcaattgatttctctgtatttctatcttgttcccctccccgactaactggattattttgaagcaagcccaagatacccaatgatttcatgttagaaaaataatgtaaatgtcagaaatataaaacctttaggccaagcatggtgactcatgcctgtaatcctagcattttgggaggccaaggcaggtggatcacttgagatcaggattcgagaccagcctgggcaatgggcaaaaccctgtctctactaaaaatacaaaaattagccgggcatgatggtgcatgcctgtaatcccagctacttgggaggctgaggcaggagaatcgcttgaacctgggaggtggaggttgcagtgagctgagattgtgctactgcactccagcctgggttacagagcaagcctccatctcaaaaataaataaataaataaaatttttaaaaatgaaaactttaaaagtccatgttatcaggtatggcaactgtggaatgtaagttatgattatattgtcctatgaatttccaaaacagttccctaatcataatagaaaaacaaaacaaagcaaaaccaaacaaacaacaacaacaaaaagaacatgaatggtagccctaactggggatgtattttgttctagggctgggagaaaatgattattttagttcagcaaactttagagcagattggcccatgctccaaatatggcctgccacctgcttttttatactgcccaagagctaagaatggtttttatttttttctttttctttttctttttttttgagacggagtcttggtttgttgcccaggctggagtgcagtggcgcaatcttggctcactgcaacctccgcctcccgggtttaagcgattctcctgcctagcctcccgagtaggtgggactacaggcgccagccaccacacccggctaactttttgtatttttagtagagacggggtttcaccatgttggtcaggctggtctcaaacttctgaccttgtgatccgcccgccttggcctcccaaaatgctgggattataggcatgagccaccgtgcccggcctggtttttcattttttaattgttgggaaaaaatgaaaaaagataacatttgtgacatagaaaaattacatgaagttcaaattacagtgtccaaaaattaagttttgtaggaacatagccacactcattcatttatgcatcgtctatggctgcttttactttacggtggcagagtttgtgtagagtttgaggaagaccgtatgtcccacacagcccaaagcatttactactatccggccctgttcggaaaaagcgtgcagcctccatctacgctttagagagtgcatatggtccagcaccatggacagcgctttgcgccatgctggtgaggagctaggatctgacaacagtcccggtatcggaggtcgttcacagagacagaaggaaatccttggcccaggaggtgccagagcatcagccaaggccacacaggaaatcaggggttctgtcccatctccctaactgtgcagcaatgggtggggattggctggtggtcaaagtgcctgtctgttgtttttgcctgtacagccaccatcctcatttccctgtgagctctctgtccctctcctactctcagcccagtgacctgagtggggctggcccctactccctgatcccatggtgaactggcccaggcctctcctgttagcatattccatcccctgactcagggatgtgttcagtgatgaggatgtgacccaagctagaccaattaagtgtcagcattgggcatttggggccactggaaaacaggtatactctttctttgaagatttctaatctcgtaggatacaaatctagattttctgggaatattttttccctttcttttttgaaacagtctctcaggctggaatgcagtggcacaatcagggctcatggcagcctcaacttccctggctcaggcattcctcctacctcagcctcctgagtagctgagaccacaggcatgcaccaccatgcccagttaattttttaaactttttttttttttgagacagagtcttgctctgttgcccaggctggagtgcagtggcatgatctcggctcactgcaacctctgcctcctgggttcaagcgattctcctgcatcagcctcccaagtagccgggattacaagtgtgtgccaccacatccagataatttttgcattttttgtagaaatggggtttcaccatgttggccaggctggtctcgaactcttgacctcaggtaatccacccacctcagcctctcagagtgctgggattactggtgtgagccaccatgctcggcttaacttttttttttttaaagatggggtattattgtgttgcccaggctggtctccaatacctgggctcaagcaatccacctacctcagcctgctgagattagagatatgagccgtgaccatgcctagccataaaaacatttttagggaagaaattctgggcccagctgggcctgatgacaattgtatgccttgatttttcagttgaatgggcccccaaattctctctttctctctctttaaccagtggagtagatatggctaattatctttaaaaattcatgtctacttccttccacagtagcagaattgcagcaaggcacatcactgctaagctagaccacatttcacagcctcctttgccgtcagatgtgaccatgtgactctcttcccaccaggggagtgagagcagagtggtgtgcaccatttctgggcctgggccacaaggcagggttgtgcctcctccacattctttcaccttttcccatgggttgaacccccagtgaactggctcattcatgtagactcggttgacttgagcagggccactcacgtctgactgaaaaagaaatagactgccttctttttttcagagacagggtcttgctctgttgcccaagctggagtgcagtggcaccatcatggctcaccgcagcctccaactcctgagctcaagggatcctcctggctcagcctcctgagtagctgagactacaggtgcacacctccatgcctggctcattttaaaaaatgttttgtagagacaagtcactatattgcccaggctcgtctcaaacttatgggctcaagcgatcctcctgccttggcctcccaaagtgttgggattacaggcatggaccatcatgcccagccgactgtctttaagccactggatcatggtcaggcctctttgttacagcagctagctggccctaactaatacaagcaataggaggtaggctcccagcactagccaggaaggatggttgctgatgcaaagcttctcaccatctgcacttcatcgtagaggggtccccaggctccagacggggggtacgttctttctacctcatcatacaagtgcccagggaaggccatatcctcatcttcacctgtgaaacctggagttggagtggaagggagacacgatcaaggcacccagtccaggcgtcgggggtacctctgagtgagggaatcctgacatggtcctaactcacctcgggaataagacacctcctcctgcgtcgggggcagctgggggctgaagtccctcagggagcggtaatacggctctgcctctgttgtgctgacctgttccccacacgcaaaacaaacaaagccctttccatcctctgaccccactgtgcccggaagggcaatgatcaacctgatgctaacggcagggcttcagtcgccgtcggtgccctgattgtggggtcaccagggccacccccacttaccgtggagctctgagtgtcccgctctcctgtccactggctctcctcatattcgttcctgactcggtcctcttccgaccttccaggatgaaggtgtggggggaagttgagtgctgccccccgccaccagtctcccccaaacctccctcagagccttctttacagaaaaatatccccacttaccctgcctctgtcttctctgagatgcctgaaggaaacaggaataaagggctcagtgaccctatgcaagccccccaccccggccccaggaagaccttcagtatgcagcaaccacagggttccctatcaccctcgggtctccaccctggcagggaagggtctctcctcaccctcagcaagacgcctgagtctccgctgccagaggacccccccgacacaggaggcattggagaggagcagaagccccccaagagcgaacagcacaggcagcaggggcagccccgagggtcctaggggtggaagatacccctcagtgaatcccagacaacaggctgtaggccaggggtgggtctccccgagaaagtgtagccctgaccaagtccctcccccagggtcagagaaacagatgggcagaggtctctgtgcccaccctttctgcccacccaagggcaggtggcttctttcttaagtcaagccattagcaaaacttcctccgtttgcttgaactctgcaaactcagaacggaactctggactcaggagggagcttcagctcgttagctgggcactgaagactttctgtggtccagcctcttcccacgcctccagccatgcccaccaaacttagaccctggtactggactgtccagccacacaaatcaaccaccagctgtttccagaatcactgaagcaaattcacacctcagagctttggaatagttaagtgtctgtcctcaaatgtcctttcttctcaagcaaacttctgtttgcctttcaaattctatctcaaggtcaggcgctgcagcacatgcctgtaatcccagcatgttgggaggtcaaggtgggagaatcgcttgagcctaggagctcaagaccagcctaggcaacatagtgaggctgattctttacaaaaaaaattaaaaatttagcagcatggtggtgcatgtctatagtcccagctactcgggacactgaagcaagaggattgcttgaacctggtaagtcaaggctccagtgagctatgatagcaccactgcactccagcctgggcagcagagcaagaccctgcctctgaaaaaaaaatcccatctcaaggacttctttattttattttgttttttaattaagacggagttggctgggcacggtggctcacgcctataatcccagcactctgggaggctgaggggttggatcacaaggtcaggagttcaaaaccagcctggccgatatggtaaaaccctgtctctactaaaatacaaaaaattagctgggtgtggtggcaggcacctgtagtcccagttacttgggaggctgaggcaggggaatcacttgaactggggaggcagaggttgcagtgagccgagatcacgctactgcactccagcctgggtgacagaatgagaccctgtctcaaaaaaaaaaaaaaaaaaaaaagagtctcactctttcacccaggctggagtgcagtggcatgatcttggctcactgcaacctccacctgcagggttcaagcgattcttctccctcagcctcccaagtagctgggattacaggcgcatgccaccacacccggctaattttttttttttttgtatttttaatagagacggagtttcgccatgttggacaggctgttcttgaactcctggcttcaagtggtctgcccaccttggcgtcccaaagtgctggcattataggcgcgagccaccgtgcccagcctcaaatgacttctttccaccaacttccatcccagccaatatcaggctgacttggctgctatatccctgaggacaaggctgaacccctctaagtaggcatctgttgggcgggcaatctcccctgtcttctactaatagcacttttttcccctggggagaacagccactccccaatctcagtcttgggttcaggcaggactccacagtgggcacatggcccggcctggaaaataagagtctccattcctctctccacagtgattgtttagacacaggcatttgacccaacgtgtgtttttaacaaaacatttaggacaattctactagctgtcaagaagatggaggtggaggagggcttctctgcccctctgattgaagaaactcagaaagaagccaccacagatgaaggcaaagttgagagagggtgagaaacagatcgctggtgagatttttgagcacctgaaagtggccacacttggaattttttatttcatataccaagactttttcttttttttcttgagacagggtctcaactctgttgcccaggctgcagtgcagtggcgtgagctcggctcattgaaggctcaacctcctgggctcaatcaatcctcccgcatcagcctcctgagtagctgggactgcaggcatgcactgccatgcctggctaattttttttgtttttgttttatagagatggggtttcaccatgttgcccaggtttgtctccaacgtctgggctcaagtgatctacctgcctcagcctcccaaagttccgggattataggcatgagccactgtgcccagccaagccattctttttcgtgttgacaaaacagctgcatttctgtcacttgcaacctttttctcgggctctgaaggggatttttttgccaaatggttgcaatcatctcccagtagtcacatccttgagtgcggggcctttccacactgactctgtgttgagccatgtgacttgctttggccaatgagacacaactatgacggaatcagctagtaaattgctgcttttgacccccgtgaccacctccatgtgaaaaagtcaagaagagacacgcgcccagttatctccattgttccaaccaagagccagatgactatcagaagtgtgggaagggggcaaccctagaccacccagtccagtggagctgccagctgactgcagagatgatttaagccagcccagaccagcactgttccgccagactcagaatcatgaggaagaatgttgctataagcacccatgtttggggtggttcattatacagcaaaagctaactgatgcaggcttcttacaggacatggagtgagctaattcttacggaattaaactaaatttggaagagaagaaaattta[140 bp omitted]gaaacctcatctctactaaaaatacaaaaaattagctgggcgtgttggcacgtgcctgtagtcccagctactcgggaggctgaggcaggagaggaagccgggaggtggagatagcagtcagccgagatcgcaccactgcactccagcctgggcaacaaacagagcaagaatccatctcaaaaaataaaaaaataaaaaaaaaaaatgccgagtgccgtagctcatgcctgttatcccagcactttgggaagctgaggcaggcagatcacttgaggtcgggagttcgagaccagcctggccaacatggtgaaaccccgtccctactaaaaaagtacaacaattagccaggtgtggtggcaggtgcctgtaatcccagcaactcgggaggctaaggcaaaagaatcgcttgaacctgggaggtggaggttgcagtgagccaagattttgccacttcactccagcctgggcaacagaatgagactctgtctcaaaaaaaaaaaaaaaaaaaagaaagaaagaaagaaaaaagaggaagctctaaggagtctgcaagtctgcaattctgcagggacagaactaagtcttttttttttttttttttttttttgagatagggtctccctctgttgccaaggctggagtgcagtggctcagtcatagctcactgcatcctccaactcctgggcttatgcaatcctcccacctcagccttctgagtagttgggactacaggcacatgccactacacccagctattttttatttttgcaaagatggagtcttgctatgttgcccaagctggtctcaaactcctgggctcaagtgatcacatgccttggcctcccaaagtgttgggattacaggcgtgagcgactgagcttggccagaactaagtcgttaagcagctgtgactacaagcagaggaggtagggtcagagaccaggaggttccattctcaggggagccgggagggatcaggggactgaggacttgcctgaaggtggctctgtgggcagctggtcttcaggttctccagaaggctggtggagacctggggggtggatatacagattgtgacttaacactaagaatctgagataagctttaaatatttctcagcctcttcttaagcctattagattcatgggaactggtatatgactgcttaagaatatttcaaagagagctagaaattgctgataataatgacaatactattaatagcaattctaatggtaacgctaatgctaagaataatttgttttttgagactgaacctctctctattgcccaggctggagtgcagtggcgcaatctcagctcactgaaacctctgcctcccgggttcaagcaattctcctgcctcagcctcccaagtagctgggactacaggcacctgccactatgcctggctaattttttgtatttttagtagagatggggtttcaccatgttggccaggctagtctcgaactcctgacctcgtgattcgcccacctcggccttccagagtgctgggattacaggcgtgagccactgcgcctggccatttttttttttttaaagagacagggtctcactctgtcgctcaggctggagtgcagtggtatgatcatagctcactgcagcctcgacctcctgggttcaagctatcctcccgcctcagactcctgattagctgggactacaggcatgcatcaccatgcctggcccaaaaattaactgttgatgagcactttcggtgtgcaaggtccttttcacccgaattatcaatttgttgagttaaccaaaaaagactttgggctctcgatcccttaataaaggtacaagttctaaagcaaaggaggcaagtgtcatactttatgttttagtgttcaaagggaagactggagtggggtggggggaagagcagagaagattgtaggggtgaaaaagtgtccttacttccattgagaaaaagcctgctctgtcaggaagaggaaaacagaaaggagaagcttgcggccaggagtggtggcacacgtctgtaatcccagcactttgagagactgaggcaggtggatcacctgaggttaggactttgagaccagcctggccaacatggtgaaaccctgtctctactaaaaaatacaaaaattagccaggcgtggtggtatgcacctgtaatcccagctacttggaaggctaaggcaggagaattgcttgaacctgggaggcagaggttgcagtgagccgagatcatgccactgtactccagcctgagtgacagagcaagattccattgcaaaaaaaaaaaaaaagaaagaaaagaaaagaaaagaaagaaagaaagaaagaaagaaagaaagaaagaaagaaagaaaaataaactgagccacaaagatctgtgctatatatttttagaaactgagacacttgcctatggtcacacaactaagaggtagcagagaggggatttgaacccaagcttctctggaccaggctctgaaggatttaccactacaatactgtgcctatcagaattgtaacatattcatcatattcaaggaatttgtccttctcatccaacttgctgaatttattggaataaagttatccataatattccctaattatcctcttaatgtctgtggagtctgtggtaacatcccttcttccattcctgttattggtaacttgtattttctcccttttatttgtcttaatcagatttataaatgttattgatttttttcaaataaccagcttctggtttcattgattttctcaattgtttttctgttttctaattcattcatttctgctcttaccattattattttcttctttctgtttactttgggtttaatttgttcgtcttttattagcttctttctttctctctctctctctctctctctttctttctttagatggagttttgctcttgttgcccaggctggagtacaatggcaccatctctgctcactgcaacctctgcctcccaggttcaagtgattctcttgcctcagcctcccaagtaactgggattacaggcatgtgccaccacacccggctaattttgtattttcagtagagacagggtttttccatgttggtcaggctggtctcaaactcccgacctcaagtaatacacccgccttggcctctcaaagtgctgggattacaggcatgagccacagtttcttaagatgaaaacttagaatatgcatttgaggttattctcttaaaaaaaaaaaaaaaaaaaaaacgaaaactagtccagtcgtggtggctcacacctgtaatcccaacactttgggagaccgaagctggtggatcacctgaggtcaggagttcgagatcagcctggacaacatggtgaaaccctgtctctactaaaaaatacaaaaaattacaggtgcatgcctgtaatcccagctacttgggaggctgaggcaggaaaattgctcaaacccaggaggcgggggttgcagtgagccgagacggcaccattgcactccaccctgggcaacaagaacaaaactgcgtctcagaacaaaaacaaacaaacaaaaagtggccaagcgtggtggctcacacctgtaatctcagcattttgggaggccaaggcaggtggatcacctgaggtcaggagttcaagaccagcctggccaacatggcgaaaccccgtctctactaaaaatactaaaattagctgggcatggtggcacttgcctgtaatcccagctacttaggaggctgaggcaggagaatcgcttgaacccgggaggcggaggttgtagtgagccaagatcatgccactgcactccagcctgggtggcagagtgagactccatctcaaaaataaaaaataaggccgcgcatggtggctcaggcctatgattctagcactttgggaggccaaggtgagtggatcacaaggtcaggtgttcgagaccagcctgaccaacatggtgaaaccccgtctctattaagaatacaaaattagctgggggtggtggcacatgcctgtaatcccagttactcagaagactgagtcaagagaattgcttgaacccaggagatgaaggttgcagtgagccaagatcacaccattgcactccagcctgggcaacaagagtgaaactccatctcaaaaaaataaaaaaaaattaaataattaaataaaataaaaaactaaaataagcacttaatgctataaatttccctctaagtactgctttaactgcaacctcaaatttttatatgttttcattttcatttaattcaaactattttctaatttcccttggtcattaatcacattcagatagtatgggttgtggttaacggttggtctcaagttcatctgcctgagtttcaatctcatctttatcttttactagttgtgtgaccttggacaatttgcttaacagctataggcctcagtaactcatcataaaaggggaatagtattgacttcaccatactaccctacacatcctctgaggaatactccaacctgcccaagcctcccttcccacctggggtagtgatgggaagctgggtccctttgtcagccagtccactgtcccccaaggcattactggccagcagccagaccctgtatcttgtagaaggctgtagaccagtcagcgtgaaggtggtggcctggggtggtacgacatccacatagtggaaccctggagtccccagggcctcatacctgcaggacagggggatagtaaattcagggaagtgccctagcccattcccttccctcctgcctcgacaaggacccacctgatgcagaacctctgtggcaggcccccatcaaagccaggcttccactccagccccacggagtgtggggtcagactcacaacctttaatcctgatggagggtcagggcggcctatggggagaaagatgggaaagcagtcagaggatacaaaagaattccagaagattctgtccaggttttccctaggaatgattttaaatatacaatcgcttctcattgttcatagcatactcatgttctgtaaggtcatggtgaacactgctctggcaaacaccaaactgtccctgtaatcccagtactttgtgagaccaagtctgaaagatgcttgagcccaggagttcgagaccagcctgggcaacatagcaagaccctgtctcaaattaaacattaaaataaaaaataattttaaaaagaagtaagtgaaaacaaaaccaaaagaaacagcaaaaaaattcaagaccaaatggttacttctatggaaaatgaagggttaagtttctttctttttttttttttctttttttttagatggagtttcactcttattgcccaggctggagtgtagtggtgcaatcttggctcactgcaacctccacctcctgggttcaagcaattctcctgcctcagcctcccgagtagctggattacaggtgcccgccaccatgcccagctaatttttcatatttttagtagagatggggtttcactatgttggccaggcttgtctcgaactcctgacctcaggtgatccacccgccttggcctcccaaaatgctgggattacaggcatgagccaccgcgcctggcatggttaggtttcttttcttttttttttcttttcctttttttcttttttgagatggagtctcgctgtgtcacccaggctggagtgcagtggtgcgatcttgactcattgcaagctctgcctcctgggttcacgccattctcctgcctcagcctcccgagtagctgggactacaggtgcccgccaccatgcccggctaattttctgtatttttagtacagacgggttttcactatgttagccaggatggtctcgatctcctgacctcgtgatccacccgcctcggcctcccaaagtgctgggattacaggtgtgagccactgcacccggcagttaggtttctttaaacgtctcatcatagcatttgcgtcaagcaatcaatacatgatttttttttttttttttgagacagagtcttgctctgtcgcccaggctggagtgcggtggcgcgaactcagctcactgcaacctccacctcctgggttcaaacaattcttctgcctcagcctcccgagtaactgggattacaagcgcatgccatcacgcccggctttttttttttttttttaagt[131 bp omitted]agagaaagaattctgtttcctctgggaattctaacagaccactgtgagggcccttagaataaagccaacacagagacatgcagacgtaagaatgaagagggctggtcatcacacctgtaatcccaccactttgggaggctgaggcgggcagatcacctgaggtcaggagaccagcctggccaacatggtgaaaccccgtctctactagaaatacaaaaattagctgggtgtggtggcgggcgcctgtaatctcagctactcgggaggctgagatgagagaattgcttgaatccaggaggcagaggttgcagtgagccaagatcgcgccatcgcactccagcctgggtgacaagagtgaatctccatttcaacaacaacaacaacaacaacaacaacaaaaagaatggagagttgctgatggcagctgaacctagatccagaaacccctgaaaatctatttttcagttacttgagctaacaagtaccccctctccatcttttttctgttcttttctttttcttttgcctttgttgtgggtcttcctgaagatccagtctccattaggattttcagggcaggcaaaaactccatcctcacacatacacagaacttccggtttcagaaacatgggcagcccagggccaatcagggatgtgggaatggatccagggagcaccccctccccaacaccctcacagcccctccatactgatgctgacaagttgaatgttggtttggtccgagccaagggcgttggtggctgtacatgtgaagagggcgtaatcctgggcggcagacacgttggcaatggtcaggaggctgctgtggacaccaccctggtggtatgtgtgctccgtgtacctagagagaaggtagggcaccactcacccttccattcacccaaccacttatgcttggaatcatctatgcatccatccattaatgtaaccgtctgcctatctatccattcatccatttatcttttcatccactcaaccattcactcactcattcctccacccattcgtcttccttctctgcagggactcagggaggggaagtggggctggaggtccagacctggggctggagtgctgcctggctgggcttgggctcacctgggatcttggagatccagagggaccccgttttttgtccaagtgaaaacgatgttggggacacctcgggcacggcagtggagggtggcagaactggtgctgtctccagctgcagccaccttagttaggggagtggggtgctccacctggggggcaactgggaggggatgggcagtcaacatgagctatgtgggagacatgagggctgtgggttcagtggcaggtcttgaagtcaggtgtttgggtaatacccacatctgacaacaagacggagcagccgtcgtgctggaggcgccaccccattgtccacaatgcactggtaagcgccagcctgggccagtttggcatggtgaatccgcaggcgccccgttggtcccctggatatcttctccatgtcatccaggctctggtcctcctcatcttctccctggaggcccaagagtccagaattggcctcccagtctagccccagatccatcactgcccaaattgtcccttctgtagcctcattctcctagccacaatcaccctccacagaggtattgaagaaaaaaaaattctcctgtcatccatctatccatttactcaatccatcttttcatccaccaatccaggcaaccacctacccatccattcacccaaccacttatgcttggaaccatctatccgtccatccattcatttatccatctgcttatctctccattcatccatttatctttccatccactcatcggttcactcactcattcctccacccatttgtcttccttctctgcacccatgtatccacccctgtagctctccacccattcactcaactattcactcacgcttgcacacccataaatacatgcatctgttcagacatttacccagctacctatttattcatctttccattgatctacccacccatccattcatcaattcatccatcatccttccatagatatctttcctctgatggtgtatccgtccatcatctaccctctatccactgatttttctccttcaatcatcttcccacccatccactcacccatttatccatcctttcacttgtccatctgttcctccatccactcactcattcatccacctgttcatccacttacctaccttttgacctatctatccatctacctacccactcgcctggctgtctagccatttatccatgcattcattttgccaccaacagttattcattctgggagcatgccctggcgagtatatagttataagggtcatacagatgtatgtggtccccactcccaaggaactcacagtcaagaaaccacaaccccttgaccccacctctattcaccaaaggctggatcctcaccagtctctcccagttgaacatgcccgggaggatgggattggcatcgacagtgcagactatgtccacagaacccccgacgttcacctcagtggggtcctggagggcacggatggtgggagcatctggtggaaggcagaggcttggggaagacacttgggcccagacaggtctgggtgtgagagggccccaggtgggagggatgtcttaggggttccaggaaagttatgggtgtggacacaatctgcccttaataccaaagggttggaggagagttctcaaggttggtgaggttgtctccaccctccactatgcctctgtgataattagagtgagttgagtgggcttccagaattgtgtgtgtagcagggcttatacagtgggctctcattcctgacgggagcagcttccgtgtctaggcgggcaccctctctgggcagagattccacactgggtctctctagtgggaggggttccgcagtgggcgtggttacaccgcggctgggacttccagaacgggagggttccaggatgggtggctatccctgggtgggcggagctcccacaatgaggagactccacaatgggcaaggttccttgggtgggtgtggtttccatggtgggcggggctcacagtgcacgtccagccgcagccgcgcttccgcggtgccctcagagttctggcagtgcagctgatagaggccgtcgtccgcgcgggtcacattccacagatgcagagccccgctggacaggatgcgatgccgggggccgcccgctggggaaggccagaataagggacctggcaggacctcccatccccgggacccctccccatgaccacttccctcacctggactgaggcgatagccgcggaaggtccagttgaaggcctcgggggcggggttagcggacacggacacgggcagcaacgcctcgccctgctccaccgcggtcaccaccagcacctgctcccccaggaactctggacggtcttcagagggggcgccgcagggagtcaagattgttgttaaggttagggtcaaggacagattggagatcaggcacaggttcaagggttaaagttggggtcacgacggggtttaaggttgtggacaaggtaacaagttcagagctaagctcaggggtaaggttcgggatagaagttagaatacagtttaggaaaagagcagaagccagggtcagtttgaaggatggaaacaggagtcatgaggggggttaggagagaggacaaatgcaagatgggaggaggcaggataggagttggcccaggaccacgggtcaggatgaaggtcgggagtttcaagtttcaggatggggttaatgatagagtgatagtgtcaaagcaaagacccaggccaggtgcagtggctcacgcctataatcccagcactttgggaggccaaggcaggaggatcacttgagtcaaggtgttcaagatcggcccgggcaacatagagtaatgccatctctatttaaaattaaaagtacaaaaaatcagcctagcatagtggcacgcgcctgtaatcccagcactttgagaggccaacgcaggagaactgcttgagcccaggggttcaagaccagcctgggcaacatagtgagaccccgttgctacaaaaagtaaaaataaactagcgaagcgtggtagcgcacacctgtagtctcagctactcgggaggctgaggtgggagtatcacttgagctcaggagttggagactgcagtgacctatgattgcgtcactgcattgcagcctgagcgacaaaaaatgaaagagagagagagagagaagagaaaaagaaggaaaaaaaggtaagacccaaggagtagtttagggtcaagaaggcatcgagaggggctttcaggccggggcacatacacagtacgttgaggcgatagaaggagctcacggtttcgcggagctcggcgctgtgggcgcggcaggtcacgcgctggccatgatcgcgggatgacacttgcagaaggacgctcctggcggcggcggagcctttgaatggggctctccggggtggggcggccacgccctccagcctgtggaaccggggtcaagccagggctgcgagcggagccagaggctggagaggcactaggcgggggcgggacatgcgtggagggggcgaggccagaccagagaggggagggatccctcgcactcccacctctccccttccttgtcccaggacaagttgaccggcggattgctgctgacgctgacgcatgtcaagtttaaggcgtctcccgggcgcagtgcggatgcgttggccaggatcgtcacgttagttgggggaactgggagacggggttggaggagcgagactcagaggttaggggcggcctggtctgcgtccaccccgcctgcaccccaggctccgcccagtctcgggtcccccaccccgcctccgcccgctttccccgggtccagggttcgctgggtccctgccccacctggctctgtccctcccgccccgcccccgggcctcagcagtgcgagccctcacactgcaccgccagctgcgtggacgcgctgagctgtccagccttgcacgtgaacttggcctggttgtccgacggccctgtgaccagcaccagctctcgggagaaggtgctcccagatttctccacgctgccgagatgcacgcgccgcgactcctgcggcagccgcgactcggtcacggtgcgcgagtcctacgggccgggagtgactggggttcgcaggcagccctgccgcttccaccaacccccaacccccctaccctgcccactgggttggtgccgccagcccaaacaaagcctttttctgataaggagaagcactctcatcagcaccacccccctagggcaaagcagtggggagtggaactgagtgaccccctccctggagtctctcccgcctccccgagtccctgtgcatggcagttttggggatctgaatccgccttctgtcccacacccaactcctgctctgcctctgcagccacctgcaggctctcagcgcactcctcaaaatctatttctgctgtgtttacccaacaccacctgcaggaaactcccttgaaattcccaggcctttcccagagttcctcagttccttttcttaaaattcctgctgtccccaaagatttcctttgaaattttccttaattccagtgtctttccatagattacttcctttttttattattgctgctgcacaaattaaactttccatagatttctgaatctttcccgatattataatatcttatgatcccagtcttttaacagattcctttgtattgcccagattctcagcacttccccagaattccatccaattaaaataaaattccattgtcatttctataatttctagtcttccccccaaagttttcaactagctccctaattcccaggattctcctagaattctattaggcttctctttcattttaatgaaatttcattttcttgcctccaaatcccaagagttcagtttaatactaatgaatttccgatagtctgtggaattactagcttttctccaaattttcttttcttttcttttctttttttttgagacggagtctccctctgtcacccaggctggagtgcagtggcacgatctcggctcactgcaagctccgcctcccgggttcacgccattctcctgcctcagcctcccgagtagctgggactacaggcacctgccaccacgcctggctaattttttgtatttttagtagagacggagtttc[140 bp omitted]cggtctcgttgcccagactggagtgcagtggcacaacctcggctcaccacaacctgggcctcccggattcaagcaattctccagcctcagcctctccagtagctgggattacaggcccccgccaccatgcccagctaattttttgtatttttagtagagacagggtttctccatgttggtcaggctggtctctaactcccgacttcaggtgatccgtctacctcggcctcctaaagtgcttggattacaggcgtgagccactgtgcccagccaaattttacagcattgttttttttttttttctgggattcaagtctttccctaaaattcctgacatttcacctgaattctgagggttttcactagaattttctttaattttaatgaaattaccttttctctagaatgcctaatcttgattcagaattccaatttttatcctaaaattctcactgtttccccagaattttcctaggattccatttaattctcatagcatttgtgtctttcctgattccctgccaaacctcagaatctttagtacttttcaagaaatttaatctttttccaagattgcccaagattctgaaggagagaaggggcctggtccttcccccacattcctggccacccccatagccctggcgtggcaccaaccttgtaccacatgagggagggctctgggttgcccccgatagccaaacacaccagcctcacccgggtcccagcccggagcttctggccctctgggggaccctcaatccacagtttctgggcgggatctggcggggagaggaaggaagaatgactttttctctgtgctgggtcctgaggcttgggggcattgctgggccagggcaggggctcacattttacgttcaggatgagcgacttcttgaaggtctccttggtgaaggcttcactgaaggcctcacatgtgagggtcagaccgttgtcctcccgccgcgccaggaatgtcaggttggacatggagatgtgaccgccatgcagtccctggcagggagtgagcttcagacgtggggactgcagcacccctatccatcgtgctagaggcctgagtccatcccagtccccagcagggacacaggagacatctctacctccccctctgttggacccatggtcctcaaggagaaagccccccaggctgctggacccaccccttccctatccacgagtcatgccctcagccccctccatgctcagacccaggagcctggcccccgcctcacatccatgactgtctcctccatgggcagcagctgccgccagcccagccaccatcgtagcagaacccgcgggcgactggacttgctgacacaggagagtgtcacgttcttgttctcagtctgggatgcagatcccaagataataatggcactagggggaactgcagggacagagaaggaagacactaagctgggctggatttctcacagaccagcccagacagaacaggactggagacagatgctgagatctttggcatccagtaggcataatttgggggcacacacagatggttctctgaggcacagaccgacaggggggcagctggcaccaggactcacaggtgacctgcagtgtgatgccgtgctcctgggtccctgcagacacgctgttgtgggcctcgcagctgagctgcgctccatggtcttctggcctcacggtcatcaccagcacactgcgggccaccgcctgggtgtgctctgtgccccacgctgtggacaccggctggccattctggagacagggacaggcctgggccagctcaggactggctcccagaccccactgtccccccattccccatgcccgcgtttgccctcaccttcagccactgcagtgtggctaagggattaccccctcgggccacgcacggcagctccaagctctgtcctgcccgcacgtgcccctcatccaggcctggccactcgatgacagggggtcctggagggactgggggatatcagtcactcagtgggcctggagtagcccatccactctttccaggccccacaacctgcctttgaacccccatgtttctctgagtgcctgaatttccataatccctgtgatccccccacaccccccagtgcctgctccccatcctcagcgccctagttggcccagttctccacttacacagaacattcacggtgaatgaggccttgatgggggcctccagtgctgggctagacgcctcacagaccagcaactgcctattatctgagctccggggtgtcaccctgggatgagaagtcagggttatagagtcagagtcatcatctgaaatttggggagtcagggagaagaggtggggatgtcacctctggtccccacacctggtctaagtccccatgctgatctcctctgggatccagggttccatgggagagattttgggggtgaacagtgagaattggagcctagagagccccacatctgaccaaaactttagtgcttgggactctagaactgaggttcccatgaagtttttttgtttgtttatttgtttgtttgtcttttgagacagaatctggctctatcacccaggctggagtgcagtggtacaatctcagctcactgcaacctccacttcttgggttcaagtgattctcctgcctcagccccctgaggagctgggagtacaggcatgcgccaccacacccggctaatttttgtatttttagtgaaaacagggtttcac[131 bp omitted]agaattgggtcccagatgttcatacctagcccaagcttcatgcttgcatccctggggtctggggttcccatggggaaaattaggggtcaaggttggggggttgtttcagtttccacacctggctgtggcctccacagtgaagagtttctgctgggagccctcgttcacgtttgcagagatgtcagatattgtctgtccaccttggggcagcaagagggctagaggggttccaggctccccgcaagatagattctggggagcatggcctggaagtcctcagggtgggtgcgatgccccctccctcctcgttctagaggaaaagggcctggggcagagctgcatcccctcccgactttctggactgcctgaatgccgcagtcttcagtgctgggtcctgggcctccccgctcttctcaactccttgctgggttgtaccatgcaccctatccctcagcttctcatgtctgcaccagcgctactgcccatatttctatctgggcctcagccttgtgctggttgctgccgccctcgatgtgccctcgcatccactgggtcccacactggcctcagcatctccccacaccttctcctgggtccccatcccagggatgacatcttttctggggcccttagaagggtactggtcaggaacacacacccttcccactccagaggcttcatgctgccccctgccacccagttcacccacactcactcaggagaatggtgatgtcaggtgctggcttcgcgtccccagacacacagttgaccacgtactcctgcccagctacccaggtgaccatggtgcctgcctctggggtcagcaggagcagcttgggaggaactggtgagagaagggtctggggtaagcttccagcactgagaaggacttgaagattggagttcggtacccagagtctgggagaggagaggctgggggcttggacttccgggttgcggggtaggggagggcttgaagcccagactcatgggtcctgggcgtctctcacccatacccaggatggagaggatcactctgggagacacgagctcgggccccatctcagagcggccgacctggcactcatactccgcgtcatcgctgaggtcacaggcctcgatgtgcaggtggaattcacctgcagggggagccggaagtcagggccgcagcttccgctggtggctgagggtctcaggctctgatcccttacctctagcagggtccccttccaggcggtacctcgggaagcctgggatcctggggtcggggcccaggagcagcccatctttggcccattgcaccgcactgccaggggtgctgaccccacaacgcagctccactgaggccccctccaccaccgtcaggttttcaggcagggcccagaagccccggggaacggaggcaggaatcgccaactgcgccaggcctgaggacacagcgcggtgcaaggaaagggcagagggtttgtctagggaaggtaagtgggaaatgggggccacttggcgctgggtacaaggctgggatcccactcaccttcagtcagcagccccaggagcaggagagaagccctgagcgtcgtccccagggccatcacaggtccccctactgtgacccccacagcgcccgctgccagccacctgcgtctgtctggctttctctgggtccctctctgtgtgtctctgccacctgcttttcttttttatctctttccgttactctcctccctttctcgttttcctcttcccctcttccctgtgagtatctctctctgtcttgctctcagtctcaatctctgagtctctttctctgtctctttaaaaaaacttttttttcttttttcttttttttttcttttttttttttttagagacggggtctcactatgttggccaggttgatctcagactctttccttcaagccatcctcccaccttggcctccccaagtgttgggattacaggcgtgagccactgcgcccagtctctttatctttccatctttctctccttgtctaagccgttctctctccttttgtctctgtctcttcctctctctctgtctctctctctctctctctctcaatctctatcttctctcctgccacccctcactcctgctccttgtctcactactcacagcctttcaagaaggacctgcagcccagagtccagcaggccaggagcctaggagagcgatgaggctgatgcaggcactggcagagtcagccctgctctctgacccagcttgagctcattctcacagtgcaacctcccccaggtaccttccagagcccccagctctggcctctgcccagcaggctcctcccagctggcccagctggagcataaaatcccctgtcagcacatgccaggcgcgttcctcggtgcctccccagcctccgtgaccccagggcctggcttaggctgggaagatgggagaagtcagatcaaggtggtctcccagctcagcaggggagcagccagctgggcccccagctcttccttgccctgatacatgaccttggcaagtctctttctttctttctttcttttcttgagatagtcttgctctgttgctcaggctggagtgcagtggcatctcggctcactgcaacttccacctcccatggcttgaacctcccaggttcaagtaattctcccacctctgtctcccaagtagctggtgctacaggtatatagcaccatgcctggctaatttttgtatttttactagagacggggtttcatcatgttggccacgctggtctcgaactcctgacctcaggtgatccatctgcctcagcctcccaaaatgctgggattacagacatgagccaccgcacctggcctcccttccttttttagtagacatcagtgcctaaatgatgtcagggatctctgctggggaggatgcaagagtgagtgtgacaggctgggagagtgtgggagagagggaagatatgcatgtgtgtacgtgggtgtgagagtggggaaggttagagtgaactgcgatctgtaataagcatgtggagagcgtgtgtgtgacagtgtcttacgtgggagtgcacagggtgtgggcgggagtaaaaggcagagtccaattccaccggcccccagtgtgggtgcagtgtgagcccaaagtgggcgccctttggcaaggactgcatgagctttcttctccctctttttcttgccctctctcccatctcttctttccttctccatgtctctctctctccctccctctatctatcttgatttatctttctttcttttgagatggaatcttgctctgttgcccaggctggagggcagtggcatgatcttggttcattgcagcctcaacttcctgggctcaggtgatcctcctgcctcagcctcctgaatagctgggactacaggtgcacaccaccactccagctaattttttaaaatttgtttgtagagacagggtctttctctattgcccaggctggagtgcagtggtgtgatcatggctcattgaagcctcaaacctcctaggctcaagtgttctttctgcctcagcctcctgagtagctgggactacaggcccgcatcaccactctggctatttttttttttttttttttttttttgagagggagtcttgctctgtcacccaggctggagtgcaatggtgcgatgttggctcactgtaacctccgcctcccaggtccaagcgattctcctgcctcagcctcctgagtagctgggaatacaggcattgaccaccacacccagctaatttttgtatttttagtagagacggggtttcgccatgttggccaggcaggtctcgaactcctgacctcaggtaacccacctgccttggccccccaaagtgctgggattacaggtgggagccgctgcaccccgccacttggctaattttttttaaatgtttttgcagagacagagtcttgctatattgcccaggcttgtctggaactcctgggctcaagcaatcctcccatctcggcctcccaaagtactaggattacaggcatgagccaccgcacctggcccttgatttatctttcttttttttcttttttctcttttttctttttttgagatggagtttcactcttgttgcccagactggagtgtaatagtgtgatctcggctcactgcaacctctgcctcccgggttcaggcgattctcctgcctcagcctccctagtagctgggattacaggcatgcgccaccacgcctggctaattttttgtatttttagtaaagacggggtttctccatgttgatcaggctggtctcgaactcctgacctcaggtgatcagcctgactcggcctcccaaagtgctgggattgcaggcgtgagtcattgtgcccagctgatttatctttctatctttctccatctgtttgagactctctcgctctctatattaagttgttaaatctcagtcaatctttatttcactgtgtctctccatctctatatgtctctgttattctgtttctctgtctctgttctcacctctgtcgctcccctcaccccacagtctgtctcacacacaccaggagctccataaatatttgttctcagccacactctgaccacgcctctttctcttatgtgtctctccatctccgagtggctctgctcatcacatccctggattttataaccatatgctggtgggcctgccctccccgcgtgcacatacacttgcctgggataagcttcttctgcctgcttatctcctgcgggaattggaaatgctagttttctccctacctccccaagacccccgccaatatcgttcccaggaacaagatgaggcatctggcctcagcccccagcttcatcctcgatgctggacttccatcttccctcacatgcttgactccttgccctcctcccacctcccctctcccaactgctctctacaccccctgggaaatgggctggatgccgagctgggggagtggctctgtcctgggggccctcgccagatggtgtccctaggtgccagagcgtggagctgtcccttgctggggcctttaataagcacaaaccttccaccctccaccttggctgttttccttctctgcatgctcctgggaccttgggctctccatctttccatgtccgtagccccagagagccaggaaggggaagcggcgtcaagtgcctggaaaaacagccccatgacttgagttcctccctaagactcaggagttccagccccatgtccatcctatttcaaaatccaggcactagataagccacacagaagccgggagtgtaggcccccagatccctcccctctcagaccctggggtctcagtcccttctctccaaggactcgggaatttgggcctctgatcctcctggccacactacccacccccgcacctccccatacacacacacacacacacacacacacacacacacacacacacacacacacatacacacaggacttaggacagatgttcacggtctgatttccaaatcctcctgggcctgtgtgggggtggggagagattggcagatagatccaccgactcttaagacttaagaccagatattctgacccctgtcaccctcttccaagtgcaccatgcacttgagtgcaccttgagtctccagcctctcaaggaaccgggagatcaggccatcagcgtctcagccagcaaaggcctgaaccaccagtcccttataaccctgtaagtccaacccccactcccaaccccactcccccatttagggacacggagtctgagcctaagaacagtggagaatctgaatgtggaccctccagttcttacaggtccaggaatgtcagatcagggtcccagccccccagccctccttcaggctgctcggggtccctcccacctgctcggccagctgcgcagcgtgggaacgccccagctgggctgcatggagccgtcaggacaagctgcgcggttcccagcctccctgcctgccccggcccggcaccgccgcctcccagccgtcgccgggcaaccaggccgaggggcccggccggccgagtggggagaggggttgggctgggactgcggggtcctgggaaaggaggggccgagggcctggattcctgggtcttaggacgtgctgtagtttgcagcaataacaagggaacagagggatattttgaggaggggttttgaggctgggggagtcgaggtaggggtcccaactgtcccccaggtatcggtgtgccctcttcccgacacgcaggcccgggggagccccggaccccgcatcccccagggcgcggaaactggcgaggccccaggagctcccatttatagctcagtttccactgagcgcagtccctctaggacctgggctgagcaagtttcttccactctctcccttccctcctcctcaccccttgcctgcccctcaaccccggcagggcgcaggtgtccaacccagccgggaccccctccctcctcgaacccaggtgttccggctcccagaccccaattgagctgggggcgcccacccgccgggggatcccgccctgcgtcccccattcatccgcgtctcagccgcgggagtttctcaacgggaagagggcggagctcccggggggcggacccgggcggggcgagcgggatcgggccctcttggggtctcccagagacccaggccgcggaactggcaggcgtttcagagcgtcagaggctgcggatgagcagacttggaggactccaggccagagactaggctgggcgaagagtcgagcgtgaagggggctccgggccagggtgacaggaggcgtgcttgagaggaagaagttgacgggaaggccagtgcgacggcaaatctcgtgaaccttgggggacgaatgctcaggatgcgggtccccgccctcctcgtcctcctcttctgcttcagagggagagcaggtaccgcacgaggggagcggaggaatatggggtgggggtggggagttgcttgcgggctgcctcttcactagcgagaagggagctgggggctgggactcctgggtcctgaatgaggaggcccctgaaggtgctaagctcagccctgctgccccgaactctcctaggcccgtcgccccatttcctgcaacagccagaggacctggtggtgctgctgggggaggaagcccggctgccgtgtgctctgggcgcctactgggggctagttcagtggactaagagtgggctggccctagggggccaaagggacctaccaggtaagagtgttctctccacgctgggacgggctggctagggggagagttgctgggctcggctgtacctgcagtttctattttgacattttcaagtttgggaaattgatgggctcgggtaaacatttaggagtcctgatttttgagctgcttctttgggggtgacccacggagtttgggaattattatgttattgcaaaatagtacataggccaggtgcagtggctcacgcctgtaatcccaacgctttgggaggttgaggccagaggatcgcttgaaaccaggagtttgagaccagcctgggcaacataacaagaccttatctctacacaaatgtatatatatattttaaacaaattagccgggtatggtggtgtgcatctatagtcccagttactcaggaggcttaggtggtaggattgcttgagcctaggagttcaaggctgcagtgagccatgatcaagccactgcacttcaggcaatggtgagaccctgtctcaaaaaaaaaaaaaaaagagaacataaatgcaaaaaagtacagtaaatataaatggaagatttaccaaataaaatagacacacacagccaatacccaagtccattgctagctccccagaagaccccgtgttcctttcccctatcatagccccctccccctcactccagaagtagtatctaacctaatttttatggcaatcattttcttgctttccttcctgactttattacccctaagtttgcagtgactctgggttgggagggagttagagtctctctgggcccagtacacactttttaatagtgtcttaccaccaaatgtgtgggccagttttctggtggaggatgtctggggatggaggcctgaggccaggatttcagaaccatggtgtgctgactgccttctccctgactccagggtggtcccggtactggatatcagggaatgcagccaatggccagcatgacctccacattaggcccgtggagctagaggatgaagcatcatatgaatgtcaggctacacaagcaggcctccgctccagaccagcccaactgcacgtgctgggtaaggacctcgcccacttgtcccctgggagcccaagagggcagcccgtactagctgtgagtagcagagcccagggagcccaggggcatggtcaattggagctgagaagatcaggatccatctctgaccccaaatccaccttgcagtccccccagaagccccccaggtgctgggcggcccctctgtgtctctggttgctggagttcctgcgaacctgacatgtcggagccgtggggatgcccgccctacccctgaattgctgtggttccgagatggggtcctgttggatggagccaccttccatcaggtcaggtccaaattcctgtgctagcctttgcccattgagggaaacttgggttacactctgaccacaggctcatccagaagagaagaagacatgggagggcagaggttcatgggtttggactcttgaaatatgatgcagggtaaagattctagggccagactacctgggttcaaattatgtctcagccacttgctagttgattgatcttgagtaagttagttaacctctctgtgcctcagttgccttatctatacaatcaggataatagtagcatgcatgtcatagggtattgtgagaattaaataaataaatacctataaatgcccagaagagtgaccaatacatagtgagcactatataagtaaggcaagcttgtccaacctgcggcccatgggctgcatgcagcccaggatggctttgaatgtggcccaccacaaattcataaactttcttaaaacattatgagacttttttgtaattttttagctcatcagctatcattagtgttagtatgtgtggcctaagacaattcttcttccaatgtggcccaggaaagccaaaagattggacacccctgatgggtagatggcattattattcttatccttccctccagaccctgctgaaggaagggacccctgggtcagtggagagcaccttaaccctgacccctttcagccatgatgatggagccacctttgtctgccgggcccggagccaggccctgcccacaggaagagacacagctatcacactgagcctgcagtgtgagtgcagctggccctgggaaagaggggtgtggggccctgactcctgggtatgaggaaggaggggactgtggcccttggggaatgaggaaactggagcctggactcctggatctaagatagcaggagagggctgggtatggtagctcacgcctgtactcacagaactttgggaggtcgaggcaggcggatcatctaagatcaggagttcgagaccagtctggctaacatgtcgaaaccccgtctctactaaaaatacaaaaatttgccgggcgtggtagcacacacttgtaattccagctacctgggaggctgaggcaggagaatcacttgtacccgggaggcagatgttgcggtgagccgagatcatgccactcagcagcagagtgagactccgagcaggagaggacagacagctggggtccctggggaaagagaaagctgggccttgactctcacatcggggagactaggagagggcagaaggctggcacattgaggtaactggggaaattgggaactgaaagcccagactcctggctcaaagggagaaggggattaggggcccagactcctgggatggaggaaccagggactggacacctaggccagtgacggaggtgttcctggtccttgcccatctgaccattgtcccaccctcacagaccccccagaggtgactctgtctgcttcgccacacactgtgcaggagggagagaaggtcattttcctgtgccaggccacagcccagcctcctgtcacaggctacaggtgaggacgaagacccacctctccccagccccaagagtgagcttgggaagggctgggacctgagtaggtgtgccagagaggccaggacaacgttaacagcgccaccatttcctcaggtgggcaaaagggggctctccggtgctcggggcccgcgggccaaggttagaggtcgtggcagacgcctcgttcctgactgagcccgtgtcctgcgaggtcagcaacgccgtgggtagcgccaaccgcagtactgcgctggatgtgctgtgtgagctggggccggcctgtgggtgtggtcaaaggtggccgtggctttcagggctgttgagggtcggggcctggaggggcggggccgggagagcgagcgtggggtattaggaggaggagagtgtggagctggggcatattcttgcgccctagagggtgtggtgtttctgtggggctggctgatcccaggtcagtggctgcattccgccccggccatgtgacccctagtctctttcgtccagttgggccgattctgcaggcaaagccggagcccgtgtccgtggacgtgggggaagacgcttccttcagctgcgcctggcgcgggaacccgcttccacgggtaacctggacccgccgcggtggcgcgcaggtacagccctaaatctgaggcggtggctggagggggaccaggcttccttacaaatccggcttctgacgccccttccctgtcgcaggtgctgggctctggagccacactgcgtcttccgtcggtggggcccgaggacgcaggcgactatgtgtgcagagctgaggctgggctatcgggcctgcggggcggcgccgcggaggctcggctgactgtgaacggtgagaaggcggggcttcctaggggacctggcccgtcctgggatagggagcggacagagggggcaagggctaatgcagtgggagtggcctggaaggagctttacacccagcgggggctggagaccggacctattgaaggcgaggcttttaggagaatcggagtttggaggcggcgtggcctgattgattgaggttagcggagagtgcgctggacagacccggctttgttacagcctttggggagggcaagacctctcctctgagtgacctacagtctccatcccagctcccccagtagtgaccgccctgcactctgcgcctgccttcctgaggggccctgctcgcctccagtgtctggttttcgcctctcccgccccagatgccgtggtaaggaaatgtcactcctcccgtgacccatccagccgtgatccctgacctcccacctggccccccgaaactactgtgaccatttctgacttcccagacatccctcctgcttcttcctcccctcctcagtctcctccgtgtcctccctcttttgtgcccccaggtctggtcttgggatgagggcttcctggaggcggggtcgcagggccggttcctggtggagacattccctgccccagagagccgcgggggactgggtccgggcctgatctctgtgctacacatttcggggacccaggagtctgactttagcaggagctttaactgcagtgcccggaaccggctgggcgagggaggtgcccaggccagcctgggccgtagaggtgagaccccagcccgaagaccccaaatctggagagtctaaaccccacaaacgcagggatcccccagccgagggctgcaaaacctcataccctcaaatgcagaggagacctccaaacctcgggagtctcaaaactgtgggctcattgattcccaagacacccctcaaccacaaatgccttcacattctgaatcctaaactgagagactcctcacacctaggggccccaaaaagggaaactccaatgattgcaaagcaaattgcaaagtaaaggacccctcaaattctaagactccctaaagccagggagtttaaactcactctcaaacttggggaaccccaaattcaagggcctttgaatcttcaaatgtgcgaccttttgaacccaggaatcccaaactcaatccctgagcccccgcttcctggttccccctcagccttctcaggatgtcccctctgctccctgcagacttgctgcccactgtgcggatagtggccggagtggccgctgccaccacaactctccttatggtcatcactggggtggccctctgctgctggcgccacagcaagggttagtgcctgagccccgccccggctcccgaggccccagccccacacgcgccctgcctgcccagtgacctgacctggccttgggccttggctccagtcccatttccagctctgcacagggcttagctctccttcacgttctggttccctccttaagccctaactaggccttcccagggtcacactcctcggtgggaatgattcttattggtttccaacagccctacccaatcagcctcattggttcccagtcctctctcttcccgcttattggtctgcacacattgtgaccccgcccatcgcttaactccaccggtcgctgtttgtcagcctcagcctctttctccgagcaaaagaacctgatgcgaatccctggcagcagcgacggctccagttcacgaggtcctgaagaagaggagacaggcagccgcgaggaccgggtaggatgccagggtccccagacctgactgtgcctccagacctaaataatagcccagtcccaagagggtccccaaattcaaataggactctaaggccaggcatggtgcctgacgttggtaataccactttgggaggtggagacacaaggatcacttaaggccaggaattcaaagccagcctggacagcatagcaggaccccatctctacaaaaatacaaactaaaataaaataaaaaatgaaccgggtatggtggcatacacctatagtcccagctactcaggacactgaggtgggaggatcccttgagcacaggaggtaaaggctgcagtgagctatgattgcaccatgcactccagcctgggctacagagcaagaccctgtctccattttttttttttttttttatgtaggagggctctagtctttttttttttggcagaatttcactctgtcacccaggctggagtacagtgctgcgatctcggctcactgcaacctctgcctccctggttcaagtgattctcttgcctcagcctcctgagtagctgcgattacaggcgcccaccaccacgcctgactgattttgtatttttagtagagattgggtttcaccatgttggccaggctggtctcaaactcctgacctcaggtgatccacccgcctcgacctcccaaagtgctaggattacaggcatgagcctccacgcccggcctgagggctcaagtctttttttttctttctttcttttttttgagacggagtcttggtctgtagcccaggctggagtgcagtggcgcgaactcgactcactgcaagctccacctcccgggttcacaccattctcctgcctcagcctccagagtagctgggactacaggcacccgccaccatgtccagctaatttttttgtatttttagtagagacgaggtgtataccg[140 bp omitted]caagtccatgcccctgacccaattattccctaggcccagtatgtccccacagcccgtttttgttgttgttgttgttgttgttgttgtttttgagatagagtcttgctctgtcgtccaagctggaatgcagtggtgcaatccagactcactgcaccctccacctcccagttcaagtgattctcgttccttagcctcctgagtagctgaaattacaggtgcctgccaccatgcctgcctattttttgcatttttagtagagacagagtttcggcatgttagccaggctggtctcaaacttctggcctcaagtgatactcctgctgcggcctcccaaagtgctgggattacatgcatgagccactgtgctggcttcttacagcccttttattgtcctgagtgcagtccccagctcttgggtgctcttactccctcctgcctggcctccactggctggctgaaggtccttggggtctggcattggggcggggggatcctctgactattccctctcactaagttccctaccccagggccccattgtgcacactgaccacagtgatctggttctggaggaggaagggactctggagaccaaggtgagtgttgagaggggtggggctcccttcactgttgggagaggcggggctcccttcattgtgtttccgtctctctcccacgcctgtcccctcctttttccttctgttgtcctcagagttgggactcagctccccaccccactcctcctgccccctgggccatctcactcagctcccagcctcagtttgcctgtctgcagactcttcccacacatctgtcccagccctagcctccatctggagccccagaccagggctcaccctgcctgtgctctcctcatcacggtcaagccccctttcagccaccaggtcctacactggccccacatctccccagactggttcttcctctggggtcctacctcaggacagccacattgactccaggccatccccaggccagagcacttctctctctctctctctcctgcgtacctagcacatgccattctctctcttcttttttttttttttttttttgagacggagtctcattctgttgcccaggctggagtgcagtggtgcaatctcagctcactgcaacctctgcctcctgggttcaagccattctcctgcctcaggctccctaatagctggctaatttttcttgtatttttagtagagatggagtttcacca[138 bp omitted]ttcccatgtctacctaattccttcctttagtcctccagtctcagctcagacatttcttgttctaggaagcccatgcttccgtcatgacagctcgatcattttgcctgtgttccacccatcacagccatgaccactctgatctgggcttccttatcccacccactatgctgagggctctaccatcacagcccctgtcattgcctatgcctttcccaggcacagccctgacccctctgggtactgtctcatgatctgtcatttttcctttggtgtgggattctgtgaggacagggtccagttctatcctagtgacatgccttgtagcagcaacacagggtgtgacactgaatcaaagcctagaggctgttgggcaggtgagtgtctctctcctgttccctctgcaccttccacaccgacacccctcagcaggcctatatccctccgtctctacctttctctgcctatgtcctatccatttgcctcttatcactgttcctctgtctcactttctctctctcccagtccatgtgtgtctctgtgtctctgcccactcctgtctctttttgtctctctcaaggtctggtctatttcagtgtgtctctccatcagtgaccctcatcccccctgcacgctcacagactttactgagtcccatttgtcccctcaggacccaaccaacggttactacaaggtccgaggagtcagtgtgagcctgagccttggcgaagcccctggaggaggtctcttcctgccaccaccctccccccttgggcccccagggacccctaccttctatgacttcaacccacacctgggcatggtccccccctgcagactttacagagccagggcaggctatctcaccacaccccaccctcgagctttcaccagctacatcaaacccacatcctttgggcccccagatctggcccccgggactccccccttcccatatgctgccttccccacacctagccacccgcgtctccagactcacgtgtgacatctttccaatggaagagtcctgggatctccaacttgccataatggattgttctgatttctgaggagccaggacaagttggcgaccttactcctccaaaactgaacacaaggggagggaaagatcattacatttgtcaggagcatttgtatacagtcagctcagccaaaggagatgccccaagtgggagcaacatggccacccaatatgcccacctattccccggtgtaaaagagattcaagatggcaggtaggccctttgaggagagatggggacagggcagtgggtgttgggagtttggggccgggatggaagttgtttctagccactgaaagaagatatttcaagatgaccatctgcattgagaggaaaggtagcataggatagatgaagatgaagagcataccaggccccaccctggctctccctgaggggaactttgctcggccaatggaaatgcagccaagatggccatatactccctaggaacccaagatggccaccatcttgattttactttccttaaagactcagaaagacttggacccaaggagtggggatacagtgagaattaccactgttggggcaaaatattgggataaaaatatttatgtttaataataaaaaaaagtcaaagaggcaagtgtgtcttagggagtctactggcattatcactctccaccaaggaaggggtcccttagacctgtcccaaggtccctcctctaccctagcctatgaggtggctgtaggagtaaaactgtgagccacctctcagcctcttgctacctgcaaagcactctaggctctttttttttttttcttgagacaagatctggctctatggcccacattggagtgcagtggcatgatctcagcccactgctacctctgcatcctgggctcaagccatccttccacctcagcctcccaagtagctgggactacaggtgcatgccaccacacccagctaatttttgtatttgtttgtagacagggtttcaccatgttggccaggctggtctcaaactcctgacctcaagtgatccgcccacctaggcctcccaatgtgctgggattacaggcatgagccactgtgcccagccatgggctcttttaatatacatcttcacacacacacacacacacacacacacgcacacacacacatgagttgcaaacagaaaagacacacacataggcatgtatgcacagacacacgcatagatgtccacacagttgcacacaagtgacagggctgccccaggggtcctggggaagactgaattctaactctcattagaggagacaaacaagtgagccctgaagtggagcagggaaggggagactatgggtaggaaaatggcaatcccctggtccttacagcaagcgtggagatccagaccctaatcctgaggtgctgcatccacagtgggcatggtgctggtgcctgcttggatgatccttaaagaaaggtcctgggggctttggttcatggatccttgagctaggagttaaaggtccaggcccctgggacccttgggaagcagagcaagaagagtgaactcctgggtctgaaggagaatgggctgggggcttggtctctggtcctgagagagaaggtgcccagacttctggatctgaaagaggaagggactaggtctcaactgctgccttcttgactggggacattttggaggcctgtattcctgagccctcaacagaggaatgtactaggggatgggggtctctgatgcttgcatccttggaaaaggacaaaactgtgagtgtctgggtctaaagagggtgagagtcctgcgggaggactcaaaatccacaacgggcggagcccatagccggactcctggctgggcccttcatggggcgggacgcctggaatctcgaggggcgggggcctggcgcaggctcccgcccggggttcccgagctgctccactctgcgcgaagccgccacgctattgtcctgaccaggaaggcggggccggcgcggggcggggctggcggcgccggcgcagcccgggggcggcgggaggaggaggtggcggcggtggcgctgggagctcctgtcaccgctggggccgggccgggcgggagtgcaggggacgtgagggcgcaagggccgggacatggggcccgccagccccgctgctcgcggtctaagtcgccgcccgggccagccgccgctgccgctgctgctgccactattgctgctgcttctgcgcgcgcagcccgccatcgggagcctggccggtgggagccccggcgcggccgaggtgaggccgggccgggtcctgggggatgggggaaggggcgggaccgggtctctggacgccggcgcggacatgtccagggcagaaagcgcggtctttccagccaggtggtcagcccccaggcgcccccaatcacatttatgaacccagggttccaggccccagctcccccatcatgcgacgtcccagccccctcccatctcgagcataggaactggtctattcagagcccctggtcccagaagtccagccccctctccagacccaggtgactcggccccaaccccctcccgcctggacataggacccaccaagcagcgaggcatttagatccaataatccagaccccttgtattctctggacccatatggaggcccttgcagcctcccaggacccaggagtccagtccttcagtcaccacccaccccaaccagatgtagctctccagtcctcaaggacctggtgtccaggactgtaggcccctgaagccaggccttgtcagctttgcatcctgcaacgggagcctgagcaagggatggagggaggaggggccagaactcctgggttctggcctcctcctccgcgattcaggtttaaccccttcgggctccagagcggctgcgctggggtgggggcggagtctgtctccgcggcaacaaggcagaaagaatcccgggggacccaggtcgccatagcaacgggagcgctggggcgcccccgccctacgggagctgtttcccagggaacggtgcctccatggaggcggtgtgcggtgcttgggggagggggctggtgctgggggtctcggtcctagggagcaaagaaccaggggaccctcatgccaacgccccccgagccctcactgtcctttccacttccatccaggccccggggtcggcccaggtggctggactatgcgggcgcctaacccttcaccgggacctgcgcaccggccgctgggaaccagacccacagcgctctcgacgctgtctccgggacccgcagcgcgtgctggagtactgcagacaggtgggcggggccgaacgggagaggcggggccgcccatagaaagctagacttgaaaaaggcgtggtccagggtgctgcgcgatctaaggcgtggaggctggggggcgtggccaataaagaggcgcaactatgctaggggcaggggacctgttttgagatactaagtcaggaaaaggggagagccgcgagatagccagagaggaagtggaatttaggaatctggtggtctttgtaaagagtagaggtgtaggggggagtggcgaaaggataggcggggctaagacagaaagagaccttaaggaccagcaagatggggaaaggggtggagcccaatgagagcgcggagagctgggggggcgtggccatgaaaagacaaatttataacgggaagggagagttttggagaggcggaatagaggaaaaggcggggcctaaaggagggtgagacctttggggagacgaatctgactgcggggaggggtgaccagagaggtgggcttagagggaccttcagaaagaaacagcacaggaaaagagatagggcttaaagatgacgggacttttaagggaaaactgctagtgggcgtggccaatgagcacaaggagcttggatatctaaggctggtgctagggagaagcagggcctagggaagcgatgtcctcatgaatactagagccttgaaaacggacctggccgggcgcggtggctcacgcctgtaatcgcagcacttggggaggccgaggcaggcggatcacctgaggtcagaagttcgagaccagcctggccaacacggcgaaactccgtctctactaaaaatacaaaaattagcctggcatggtggtgcgtgcctgtaatcccagctactcaggaggctgagacaggagaatcgcttgaacctgggaggaggaggttgcagtgagccgagattgtaccattccactccagcctgggcgacaagagcaaatctccgtctcaaagaaagaaagaaagagggagaaagaaagagaaaagggacctgactactggagaggggtggctggcaggggcggggcagtgggctgattgcccccatctgatccccccagatgtacccggagctgcagattgcacgtgtggagcaggctacgcaggccatccccatggagcgctggtgcgggggttcccggagcggcagctgcgcccacccccaccaccaggttgtgcccttccgctgcctgcgtgagtcccaggcggggagaggggaactgaggtgggagtttctgaggggcaaggttctgagcccctctctcaggcctacattaaggggctgggtgcttgtgtcctaagtggggcagagaagcctctgaggataaaatatctggattctgaggagggtggggttggtggctataggaggatctcaccctggtgtcccgtgcttccccagctggtgaatttgtgagtgaggccctgctggtgcctgaaggctgccggttcttgcaccaggagcgcatggaccaatgtgagagttcaacccggaggcatcaggaggcacaggaggtcaggacgttggcccacccgtccccagcccccacaacccaggaactgggacctctaacaccctccgccaccagaaccgaggagtctgggccaccagcatcctcttcgcacttgggatctaagaatttcatcccccaaccccttcctctagaagcaggaatccaggctcccagcctcatcaacccccaaccctggcagcccagttccccatctaccccctcccatcccacaatcctggcatctgggcccactcttcctacaggcctgcagctcccagggcctcatcctgcacggctcgggcatgctcttaccctgtggctcggatcggttccgtggtgtggagtatgtgtgctgtccccctccagggacccccgacccatctgggacagcagttgggtgagtgggagggaaccctccatgcccatctcaaggttcctgaggcaggggatggaagcctgggagcccaggcctgggttcttactgcctgggtcctctcctgctccctcagtgacccctccacccggtcctggcccccggggagcagagtagagggggctgaggacgaggaagaggaggaatccttcccacagccagtagatgattacttcgtggagcctccgcaggctgaagaggaagaggaaacggtcccacccccaagctcccatacacttgcagtggtcggcaaaggtgaggcagtctctgaacccctggggcctctccaccatagagggagaaagatctgggggagtcttgctggggggtgtctttgggaggggcctataggggaaaggcccaactgaggagaaaagacgagagtatctttggataaaatagaagtagaagggctaacctgccaagggagggggtggtttgggggtacttgggagtagaggggccattgggtaggtcttgaggatcatttcaggaaagcttggaagatggtgtaatggattcctaagctttgcaagaacaggcccagtccagaactacatctcccataatgccaggcagcagcggtggctaaactgggtgcatgatggtctccagtgcactctaggaaatgtggttctctaggtagaaaaggcgacctggaggtgggctgcagactgacctcctgatccctggtcttgcagtcactcccaccccgaggcccacagacggtgtggatatttactttggcatgcctggggaaatcagtgagcacgaggggttcctgagggccaagatggacctggaggagcgtaggatgcgccagattaatgaggtgataatactgggggccccaggaccccctacagtacagagctccctaaataccaggaaattcctccaggacacattgatactacctccaaaggctccctaagcccctttgaccttgagctctcaacaccaccccctaagatggccagagatccatggcccttctagaatcccactgagacgctaccaggttctctggaaactctggtctatggtactctttcactttattggtttttttttttttcttttgttgttgttgttgtgacggagtttcgctcttaacacccaggctggagtgcaatggtgcgatctcggcccactgcaacctctgcctcccgggctccagcgattccccttcctcagtctcctgagtagctgggattacaggcacccaccaccacgcccggctaatttttgtatttttagtagagacagggtttcaccatgttggccaggatggtcttgaactcccggcgggaggagatccacccgcctcggcctcccaaagtgctgggattacaggcatgagccaccacgcctggcctctctttcactttaaactccttctggatcttccctcttgggaacccaggagccagcgagacttaagggatctggggcctttaaatctttttttttttttttttttgagacagagtttcgctctgttgcccaggctagagtgcagtgacgtgatctcccactcactgcaagctccacctcctgggttcacgccattctcctgcctcagcctcccgagtagctgggactactggtacccaccacagcgcccagataattttttctgttttcagtagagacagggtttcaccatgttagccaggatggcctcaatctcctgaccttgtgatccacccacctcggcctcccaaagtgctgggattacaggcatgagccactgcgcccagccatggggcttctaaaatcttaaagaggggttgggggacttgccaggtggatcagggtggattctgggatcctgaagctcccctccctatgcaggtgatgcgtgaatgggccatggcagacaaccagtccaagaacctgcctaaagccgacagacaggccctgaatgaggtaggacagccccagtgggtcctactcatgcctgtccaccacctggagcacactcagtttcacctggctctggctgtgccctgcccatccagttccaccccttcccacctatctcagcctttcctggccccatgcctacatgcagctctgcccctcttagccgtcatctgacctgacactgctctcctccccagattggccatattcggccccatctacagacttgacttgcctctcagggctggctctggagtcctgtcccaagccagggcctctgcagatgcagccagggccttcttggtctctctttgatgcatttatgtctctatcaggccccgccccctgattctggctctgctgggccaatctcacctttattaacctgacctaccccatggagaccccactcatgttagcccccattccagctctttgtcccacccctatcgtgtcatttatacacagcctgtctccagtttgaccctgcccaggccaggagccctgcaaggctttgtccctttcaccttaacattggtcagttctgctcccagattgctcccactcaatcttacagtttacatcctcacattggctcccagtgggcctagtcccacctccactctgcctggccctgtagcccaccccttccagtccataacctttggttctgcccaggcctggacccctggaacgccccccaaccccatgtagccctgcctttccaggctctctttgaccaggctttgacccatcttctcctctcctgaccctgtgcccacccgctccccagcacttccagtccattctgcagactctggaggagcaggtgtctggtgagcgacagcgcctggtggaaacccacgccacccgcgtcatcgcccttatcaacgaccagcgccgggctgccttggagggcttcctggcagccctgcaggcagatccgcctcaggtgcggggaccgtgggggcagagagcagagggtgagaagggtcagggcgggcttgggcatcctgtgtcccttccacaggcggagcgtgtcctgttggccctgcggcgctacctgcgtgcggagcagaaggaacagaggcacacgctgcgccactaccagcatgtggccgccgtggatcccgagaaggcacagcagatgcgcttccaggtgctcacatccttccagctcccaaatgcgccgctattcctcagacgcccgcgcctcaggctcttctcttgtcccttagaccctctttctgtctcttggaccccttcctatcccctgaacaccgcttctctgccccttcccagtctctcagctcagcttcctgaccctgaaacatggaccctcacatgctgtgtctttgacccctgcttcttggcccttggattcctactccccccgccgtcgatcctatgttctgtcccttggattttcactgcctttcccagaatcgtcttttttttttttttttttttgagacaggttcttgctctgtcgcccaggcaggagagcagtgtgcgatcttggctcattgcaacttccacctcctgggttcaagcaattctcctgcctcagcctctcgagtagctgggattacaggagcctgccaccacactgggctaatttttttttttttttttgacagagtctcgctctgtttcccaggctggagtgcagtgacatgatctgggctcactgcaacctccgcctactgggttcaagctattctcctgcctcagcctcctgagtagctgggactacaggcgggtgtcaccacatctggctgatttttgtatttttagtagagacagggtttcaccatactggtcaggctggtcttgaactcgacctcaggtgatccacccttggcctcctaaagtactcggattacaggtgtgagccaccacgcccggccccagctaatttttgtatttttggtagacacgggtttcagcatg[137 bp omitted]cagagacagggttttgccatg[137 bp omitted]gagacagggttttgccatgttgcccaggctagtctcaaactcctgacctcaggtgatctgcctacctcggcctcccaaagtgctgggattacaggcatgagccaccgcgcccggtcgagaatctccttcttgttccttgaaccctcttcctgtccctcaacctcctttctccataacttcacttgttttccctggaacccctgttctgtgcgctcaaatttgaattcccctttcctggatgttttcttcctgtctatgaaactccattctgtgctcttgaactccaaatcttgccttgaaccatgtcatttctatatgaccctccaatcctcaatctctgtctctggaatcccctcaaaccccactttctgttccttggactttattcttcaatttccttctcctatggcccagttcctaacccttgtaccacacatcctgtccattgcatgtgccgcttttcctcagtcgctattgaattcctccttcatactgcttcagtttcctcatctccagcctgcattgcgcagttcatccttcatgtccactcacccacaggtgcatacccaccttcaagtgattgaggagagggtgaatcagagcctgggcctgcttgaccagaacccccacctggctcaggagctgcggccccaaatccgtgagtgtctattaccctggctcccattacagatctctgagggcagatcttgactcctaaatgttgggcccccccaatttcatttattcctctataacaaacagcccagaccttagcagtgaaaatcaacaatgatttttctttgttcatgattctgccatccggtctgcgctcagcagagtggttctttcagtggtcttgccagtggtcaagcatgcagctgtatttagctagcagatcatctaggggctgggagtctagcacaaatggacctttctctctctccaaggaagcgcaaggcctctcttctccgtggagcttctccatgtggtctcatcagcagggtagctagattccctacatggtggtttatgctctctaagacatcacagtggaagttgctaggtcttaaggcttgggcccacattctatttgttaaagcaagttacaaattcagtccagattcaagggaaggaacctatatgcataccggaaagtgtgacctattgcagcccccacatctattgtgtctttctcctggatatctcacacataaccctgattctcctagtatttaagaaagctatcatcttgaggcgcggtggctcacgcctataatcccagcactttaggaggccgaggcgggtggatcacttgaggtcaggagttcgagaccagcctggccaacatggtgaaaccccgtctttactaaaaatacaaaaatcagccgggcatgatgtcgcttgcctgtaatcccagctacttaggaggctgaggcaagagaattgcttgaacccgggaggtggaggttgcagtgagctgagatcgcatcattgcactccagctgggcaacaagagtgagactctgtctcaaaaaaaaaaaaacaaaaaaaaaacataatcttgaaacttcagcctccatccttcctgccagcagtgcctccatccagcttcccactttctcagatcacacttctggctaccccacacttggggctgactctgctgtctgcatgatctcccacttgctctactggtagggtgccctccactcacccctatgctcactacctcagccacctttctgcatgtccccctcagaggaactcctccactctgaacacctgggtcccagtgaattggaagcccctgcccctgggggcagcagcgaggacaagggtgggctgcagcctccagattccaaggatggtgagtgagcccacatatagatgaccccagacattagggaacaggccccagcctaatttgtaatcccctagagtctgagggtgtcttcaccaccacagtgactgggagaggatgaggaggaacgtctaaggttgcaggggcctctgtaggatccccaatcctccttcttagtccctggaaggatgtttctccacctttctttgctgataccctcctctcttcactgttccactcccttgcttcctctggctgccagcagacacccccatgacccttccaaaaggtgagtgtctcacagttaaccccagcctccaaatcccactgaatccctgaacccagaaggaaacagggtccatccattgggaacctcagaccccctggggtagagtttgatgtactttccagccccctcctctggaccctaaagaatgagatagggccaggcgctggtgactcacacccgtaatcctagcactttcagaggctgaggcaggaggatcccttgaggccacgagttctagaccagcctgggcaacataatgagaccctgtacctacaaataatttaaaaattacctgggtgtggtggggcatgtctgtagtcccagctgctcaggaggctgacgtagaaggatcactggagcccaggaagttgaggctgcagtgagctgagatcatgccactgcactccagcctgggtgacagagtgagactctgtctaaagaaaaaaaaaaagaatgagatcagacttgggggtagggtccacagaacaagatgctgcatcccctgagaaagagaagatgaacccgctggaacagtatgagcgaaaggtaagttagtcagaactgtgggctccctaaggggaacaagatcggggcctatatggctgggtacgagggaggagatgctgggggcttggattccttgtcctgagggaagagggagctgaggacgtggaattgagatcctagaaaatgagagggctgggggacgctctcttgggcccttgggtaggaagaagccagtgccaggcttctgggttcctgacacctcctgctcccccaggtgaatgcgtctgttccaaggggtttccctttccactcatcggagattcagagggatgagctggtaagaggaggaacagccgggtacctaggggaagagaccagaggtcagcggccaggctgtgattcccaaagccacacaggaccctcaaagaagccctctgccccatctcctctccctgcaggcaccagctgggacaggggtgtcccgtgaggctgtgtcgggtctgctgatcatgggagcgggcggaggctccctcatcgtcctctccatgctgctcctgcgcaggaagaagccctacggggctatcagccatggcgtggtggaggtgagaaccatggcgtggtggaggtgtgggaagagttcctgagcccgggtgtgggcggcctgagagacttgcgggcagtcccgcccccgcaccacactgtcctttccctcccctgctcgttgcaggtggaccccatgctgaccctggaggagcagcagctccgcgaactgcagcggcacggctatgagaaccccacttaccgcttcctggaggaacgaccctgacccggcccccttcaccccttcagccgagcccagacctcccctcttcctggagccccagaaccccaactcccagcctagggcagcagggagtcttgaagtgatcatttcacacccttttgtgagacggctggaaattcttatttcccctttccaattccaaaattccatccctaagaattcccagatagtcccagcagcctccccacgtggcacctcctcaccttaatttattttttaagtttatttatggctctttaaggtgaccgccaccttggtcctagtgtctattccctggaattcaccctctcatgtttccctactaacatcccaataaagtcctcttccctaccaggccagtctgagtctctgtgggagaattagtctgtaaccacagctggacgcggtgtcatcgccgcccaggccgccttggcctctttaaacgggatgacggagctttaaatctgggcgggtcctgcgggaagggctggcgcgccgggggcggggctcagaggccagggataggcgcctgtcctggagctgtccgcggtgctgaactggccgcgccttccaactgtcagttgggtaccagtgtggaccccaaggaggctgggctccagcgagtttcccctgccatctgttcagcctcacacacaatcacatgcagcgcccaccccaatcttcgagagtcctgtaagagattatgaatcgtgaaccaccgttcccattccccaaagtcttcattccttctcggggagtctatagaaaccctcctggagtgtggaaattccagtcacgtgtcccagaaagggatatatgatatctgcacgtgcctactgaacttcgttttattttctccccctactgcccgtataaatgcagaagaatttctttttctttcttttctttccccacctccctttttttaagacagggtctaacactgtcacttaggctggagtgcagtggtgcaatcatagcttactgcagcttccaactcttgggcttaagtgaccctcctgcctcagcctcccgagtagctggaactataggcacgtaccgccacccccggataatttttttaaaaaaattttaggccaggtgcggtggctcacgcctgtaatctcagcactttgggaggctgaggcgggcggatcacctgaggtcaggagttcgagaccagcctggccaacatgatgaaaccctatctctactaaaaatacaaaattagccgggcctggtggcgtatgcctgtaatcccagctacttgggggctgaggcagaagaatcgcttgaacccaggaggcggaggttgcagtgagccaagattgcgccactgcactccagcctgagcaacaagagcgaaactccatctcaaaaaaaaaaaaatttagagatggggtcttgctatgttgcccaggctgctctccaagtcctggcctcaagtgatcctcccacctcagcctcctgagtagctgggattacaggcgtgcagcactgtgcccagtattggaatttataccctcacatgtcccattatgctggctcgggttagccctctacatatacagttatctgtcccaagagggttaggaggatttaaagggttaatattcgtggagctgttataactgcacctgccacttagcaagtatttgttaaataaattttaaagtattaaggtagcaaacactcatatggtgttcaccctgtgccaggcactactctgagggctttacatgcactggcacacttaaccattactcctgtgaaaggaaaataaatcctgggggccccaaatcactaagttaaagggaaaagtcaagctgggaactgcttagggcaaacctgcctccctttctattcaaggtcatccctgtactcactgagagaggcatattctgattgcctcctttggaaaagctaaccagaaactcaaaaggatgcaaccatttgtctctcacctacctgtgacctggaagccccctccctgctttgtgttgtcctgcctttccagacagaaccaatgtacatcttaacatatgttgattgatgtctcatatctccctgaaatgtataaaaccaagttgtaccccgaacaccttgggcacatgtcgtcaggaccttctaaggctgtgtcatgggtgcatatcctcaaccttggcaaaataaactttctgaattaattgagacctgactcagatattcggagttcacatttccatctaatggagtcagtattatgactattcctatctatagattaggaactgaggctgagagtcgttacatcacatgctctatgtcatcatccaggaaaagtcagagctaagaattcaatccaagaagcctggctccagcatccactctcctggccactttgctaacctgtttaatactccaaggttgtccaatatggtgctccgattgtgcgcttcaaaattccacgtggctgggcacagtggcacgctgctctagtcccagctacccgggaggctgaggcaagaggattgcttgagcccagggcttctggactggagtgcactgtgccacttgggtgtccacactaagtttggcatcaatatgatgacctcctgggaatgggaaccgacctaggaaacataggtcaacactctcatgctgatcagtagtgggatagcacctgtgaatagccactgcgcttcagcctgggcaacatagagggaccctgtctaaaaataaaaataaaaataaaaaataaataaataaataaataaataaataaataaataaaatccaagtgataccattcacctcccagactttgtagatttgcttttttaccacagcttcccaggagatggcagtaaagtgtcatgttctaatgtcagtatcttgcatgattttctgacagatggtttggggagggagcatctatttctaattctcccaaagggcctatgagctagctgtggttcttcataatatataactgtaaatataggtcgtgtatattgaatatacacctggtagatgttaggagaagacgcttcatggtgcaagttggatgcaatgccagtctctgtagagaactcagtttgcaccatcactctgataccggttatatctttggttatactcggatgagcccagtggaaatctatcactaacgccacaggcaccacaggggttgaaagccgcctttgtattttcacaaccaagagtgatcaacaggctaacaacaggtaaggagctccaagcaggtgaaacaggaaaagtaaggcggttttgctcaatagggtcagtgtgtaaagtaaagtttaatggtaatacttagagtatttaattttaaaatgttgttattcaaattccagcaggaaaaataattttgctgttatttatctgatgttcttgcactcctaagtcattcttttcccactgaagatgatcttggtaatactgtttttttgttttgttttgttttggttttgggtttttgagacagagtcttgtcaggctggagtgcagtggtgtgatcttggctcatagcaacctccacttcccaggttcaaatggttctcccacctcagcctcccgagtaactgggattacaggcgcccgccaccatgcctggctaatttttgtatttttaatagagacggggtttcaccatgttggccaggctggtcttaaactcctgacctcaaatgatccacctgccttggccttccaaagtgttgggattacaggcgtgagccaccgggtccggccaatttttcttataataattcagtttctaccatgtgcgtggctcatgcctgtaatcccagcaatttgtgagactgaggtggaaggatcgcttgagtctaggagctcaagaccagtctgggcaacatagtgagacacagtctttacaaaaaaaaaattagtcaggcatggtgatgagtgcctgtagttccagctactcgggaggctgaagtgggagaattgtttgagcctaagaggtcgaggctgtagagagccaaagaagacagattgagacccggtctcaaaataataataataataataatatatggacaggtgcagaagctcatgcatgtaatcccagcactttgggaggccgaggtgggagtatcccttgagcccaggagttcgagaccagcctgggcaacatagtgagaccctgtatctacaaaaatagaaacgaaaaaattagctgggtgtggtggcatacacctgtggtcctagcttctcaagaggctgaggcagaaggatctcttgagtccaggcaggaggtggaggctgcagtgagctgacattgcaccactgtactccagcctgagcaagagtgagaccctgttcttatttaaaaaaaaaaaaaaaaaaaaacacacaaagtttctgagggacattttatcatgttagtggggtgggtgtgtgcacatgtgtgtattgatatgcatcttagtctgggctaagaataccatgagctgggtggcttaaacaacacacatttatttctcacaagtgctagaggctgagaagtccaagatcaaggtgccagcagctccaaagtctggaggactctcttcctggtttgcagatggtttgttttgttttgttttttgacaaggtcttgttctgtcacctggctggagtgcactggtgcaatcacagctcactgcagccttgatctcccaggctgaggcaattctcctgccttactctctcgagtagctgggaccacaggtgtgcaccactacacctggctattttgttttttttgagtagagacaggatttcaccatgctgcccacgctgttctcaaactcctgagctcaagctatcctcccatcctggcctcccaaaatgctgggattacaggtgtgagccagtgtgccctgcccaagatggccatcctcttactgcatcttcatatggcagagagtagagagcagagaagcaagctctctcctgtctccttcttttttttttttttttgagatggagtttcactcttgttgcccaggatggagtgcaatggcatgatctcgggtcaccgcaatctccacctcccaggttcaagtgattctcctgcctcagcctcctgagtagctgggattacaggcatgcaccaccatgcctggctaatatgtattttttagtagagacggggtttctccatgttggtcaggctggtctcgaactccagacctcagatgatccacccgcctcggcctcccaaagtgctgggattacaggcatgagccaccacgcccggactctcccatctcttctaacaaggacattagtcccattcatgagggctccaccctcatgacctaactacctcccaaaggcccatcttcaaatactaccccactggggcttatggtttcaacaaatgaattttagagggacacaaacatgcactccataacaatacaaattgagatatacatcttatatgtcaacaaaacctcagatgccatcagtgataaaaaatagcattattttaggtaccacaaaaggaaaaaaaaggcaaaatataaactatgtcacacaattgactataagatgatcccaattaagttcttctgtattttttattttattattattatttatttacttactttagagacagtgtcttgctgcctcccacgctggagtgcagtgctgcaatcatggttcactgcggcatcaaactcctggcctcaagtgatcctcctgcctcagcctccaaagtagctgggactacaggcacccgccaccatgcccagctaatttttgtatttttagtagagacagggtttcaccatgttgaccaggctggtctccaactcctgacctcaagtaatccgccctccttggcctcccaaattgctgggattacaggagtgaggcacctcgcccagtccccagataactctgtctcccaatattgagacccttgtgtaatgcctcccacactgatctgggatcaatgacatgtcaacaagtatgatacaagcagggacttgtctccttggatctctctttcttggaaccactgagccaccacctgaagttaagagatccacctgccctcctggactgcatggaaagactcttgggccactcctggaagctccattatctcagctgagctatcaggcatgtgagtgaaggtgttgtggatttccaggccagttgggcctcaggttgattgcagccacatgaggaaccaaagggagacagcagaacagccagctgaacccggcgtagatttcagtcagaaacaattaagaggggctgggcgcggtagctcacacctgtaatcccagcactttggtaggccgaggtgggtggatcacttgaggtcaggagttcgagacaagcctggccaacatgctggaaccccaatctctactaaacaaatacaaaaattagctagacgtggtggtgggtgcctgtaatcccagctacttgggaggcagaggcaggagagtcgcttgaacctggaaggcggaggttgcagtgagcagagatcgcgccactgcactccaatctggtgagactgagactccttctcaaaaaagaaaaaagaaaagaaataattaaaagggtgttggtttaagccttaagttttggggtggagacattggctggagccccggaatgtgctaacatgtacattcggtctgtggtccatgaaaggttcctagctatgggggctgtgatgggtccaagggctttctgggatgggggctctttgtgtgattatattgcagaggccagagcagaggctgtggagcgggtatgagaatggggtttgggtttttttttttttttgagacggaattttgttttgttgcccagggtggagaaaagtggtgggattttaggttaatggaagttccgcctcctggatttaaggaattttcctgctttagcctcccaagtaggtgggaaaacaggtgcccgccaccatgcctagctaattttttttttttttggtttgtatttttagtagagatagggtttcaccgtgttagccaggatggtctcaatctcctgaccgcatgatccgcccgcctcggcctcccaaaatgctgggattacaggtgtgagtcactgcgcctggccaatttttttgtatttttagtagagacaaggtttcatcatgttggccaggctggtctcaaactcccgacctcaggtagtccacccgcctccgcctcccaaagtgcagggattataggcataagccactgcgcccagccttgggggtttttttgtatctttttttgagacagagtcttgctctgtcgcccaggttggagtgcagtggcgcaatctcagctcactgcaacctctgcctcccaggttcaagcgagtctcatgcttcagccttctgagtagctgggattacaggcgcacgccaccacgcctggctaatttttgtatttttagtagagatgggtttttgccatgttggccaggctggtctcaaactcctgacctcaggtgatctgctcgcctcggcctcacaaagtgctgcaattttaagtgtgagtcactgcgcctggctgagaatggggttttgtggaattcttagtttgggtttctccaaaagcagctatggagggaaggattggagggaaagttcatttggaagggatggagaacattggtaggggagacaggaagagacacagagaagaaagagcagccaataaagggtattttatcaagcccagaccactgtggggaactggggattcatctgctggggaactctggagcccgcataggccatgcacttccaagttagcccaacagacaggtgggggactatctcctatcagtaactggctgagggctgctggagtgggaagtggacacgaaccccctggctttcaacacttgccatgctcatacctggggcagagccgcaccagtggtttgagattgcccaaaggcaaatattctggggctgacacccaggctggtctcaaactcctggcctcaagtgatcctcacaccttggcctcctaaaggccagtccctcttgtgtcgccagggtgagggtgacaggatatggacttggcacccatggtggctgctacatcctcccccctcaggcacattcatcccaatatgacccctcagcgggcatcacagccactcccctgcaccagtgcccccagagatcagacaacagtggttctagtccaaattgagtttaaatttttttttttttttttttttgagacagagtctctctttgtcacctaggctggagtgcagtggcacaatctcggctcactgcaacctccgcctcctgggttcaatcaattcttctgcctcagcctcccaagtagctgggactacaggcgcatgccaccatgtccagccaattgtttttgtatttttagtggagacagggtttcaccatgttggccaggctggtctcaaactcctcacctcaagtgatccgcccgcctcggcctcccagagtgttaggattacaggcatgagccaccaaatctggcccaaattgagtttaataaagagcttgagtgatgctcagattagggagggagtgaccgggaatgctggggtctggaactgggggcccagctgagctctgaatcagagagcagtgagacctaagggtccctgatctcagagggtccctcctgtctcagggtgaggacctgaagggtgtgggtcccggggagggtgaggaggccattgtaggagatttactgagatggtatcgggatgccccaagcaccacgtagggggattacatctgggtttctgggaacgaagagctgagttaggggagagaacccgaaagatctcagtggggaaaggactaggggtgcagggtgtttcacagaaacaatcaaggggcctcgatttcacagaaatcatcaagagggctccttgtgggtagaagaggggtatcacagcaccccaaatattggggcctgttcacccctctgcagccattctggggttttaatgtaaaaccccaatggcaggatattccacatacattatcatgggtttgcaacattagcatacgctggctgtcccgcaggacggtggggactggaaaatcagtccagggtctgggtttgagtcctaagaggacaggcctggcggcgccacacggctcctcttcaacagctgccggagctgtagacaaggcaaaggagggagagaagtctgtcaggttggaaggagaggtggggaaggcacgccatgcagagggaggggctagagaagagaggttgagtgggtccctttggatttgaagatcagaggtccagagtcaagattttggaagagccaggtgcagtggctcacgcctgtaatcccagcactttgtggggctaaggtgggcaaatcacctgaggtcaggagttcaagaccagcccagccaacatggcgaaaccccgcctctaccagagatacaaaaattagccgggcatggtggcacgtgtgcctttagtcccagcttgggaggctgaggtgggagaatcacttgaacctgggaggtggagcttgcggtgagctaaaattgcaccactgcactccagcctgggtgacaaagcaagactccgcctccaaaaaaaaaaaaaagatttgggaaggaggccgggagtgatggttcctgtgatcccaacactttgggaggccaaggcgggaggatcaattgaggccaggagtttgagatcaacctggacaacatagtgtgaccccatctcttaaaaaaaaaaaaaaacaaaattagctgggtgtggtggtgactgcctgtagtaccagctactggagaggctgaggtgggaggatcccttgagcccaggagctcgaggctgcagtgagctatgatcatgccactgcactccagcctaggcaacagagcaagacgctgcctcaaaataaataaataaacaaacaaacaaataaaaataaagatgtgggaagaaggtcaaggcctgggttcgtacactgagaaagggtcaggaagcagaacttcagtgaagggaaaggggctgctggctgggggttcccacctgggggtgaggaatgagagggaattgaagggaacaggtaagaggtcaaaggtcacatctgaggtcaggacccaaggttaggggcagggggtaggaggtcacacttggggggatcaaaggtcacaccttgaggtcaagcaagattcagggttggaagtacaggtcacactgtgaggtcagggttggggtagagatcagagaagtcaccattctggggtaaaggatgaaacactgaggtcagaggtcacattatagagtcagggttgcctgagggctgaagtcaccttccgagattagaagtcattctctgaaagcgagcattgggtggggcagggaggtcatcccgcgcccgcgagctcagaggccactctacaggcaggctcagtgcttacttaccccctcagggcccggcccgggccgcagcaggtgaacgggctgctcattctccaggttgcgcagtgtggggtccgccccagctgccaacaggtgccgcacgatggcctcctgggccggcccagggggcagggcagccgccatgtggagggctgtgttcccgtgggcctggaaaagtaaggggagggctggtggggatctgggctcagctggcccaggcctctaaactgcacttcaatttctgccttgtctacgtcctacacttgtcctttcacatcccagacctcccccggccacagccacgctgcatgcatccctgtgtccacggactacatgttctggggcaatctgtgtctgcttcctatactttcccctgcagatcccacacatcgtcccctccacgtccacagcccccaggacccctaacatcccactgccccccctaccgtaccccacacaatctgcacttcccagccccagctcccaccttcatgttgacaaaggtccgcaggtctccccggggcagctccagcagcagctgaaccagagtggggttggcagcctgcacggccaagtgcagaactgtcttgttgctcttgatctcctgaggggaagggaatggcagaggtcagggccagcctcacacctaggtgccctcccacagaatccaggagtctttaaagaccctgacccttggcggagtgcggtggttcacgcctgtaatcctagcactttgggaagctgaagaaggaggatcacttgaggccaggagctgcagaccagcctggacaacacagcaagacctcatctctacaaaaaatagaaaaattagccaggcgtggtggtgcgcacctgtagtcccagctgcttgggaggctgaggcaggaggttcatttgagcctaggagttcacggctgcagtgggccatgaccacaccactgcactccagcatgggtgacagagtgacactctatctcaaaattaataaataaataaataagatgctggccctcttctgcgagccccaccaagagtgccttattcagttgtatgtcttgtgcaccgcacaacaccacgtctcagggtgtaccattcacaccatacaccttccagaactgtacatttctcatgacaattttcccaccagtgtctgagaaagagactccttttccagttcttcaaagcaactgccttggctacctgccctccattcaacacattaaattgcatcccgacccacacagactgtactttatctacaagcacaggagttggcagcattaatcagtggactagctaatattgcaatactgcaccacaatattgagctgttcccatcatatttgggggaaaataaaagacattttctaaaatgaaacctttttatgtgtctttaaggagtttgtaacgataatgaatgttaaacattttatgtgctgataacagggcaaaaccacctagtttgctcgtccaaaaaatgatgaagacaaaaccaaagctctagattaagagtgatttgaaaagacgtaacatcataatatgtgtgcttatttggatcttgattttttttaatgaaaaaaattatcattttacagccaaaaggaaatttgaatacagccaggatatttggtattacaagaaaatctttaattttttaaagacagagcaatgatactgaggtttaaaaagttcttttttttcgaagggcacaggggctcatgcctgtaatcccagcactttgggaggccaaggagggcggatcacttgaggtcaagagttcgagaccagcctggccaacatggtgaaaccgtctctactaaaaatacaaaaattagccaggcgtggtggcacatgcctataatcccagctacttgggaggctgagacacaggaatagcttgaacccgggaggcagaggttgcagtgagccaaaatcacaccattgcaatccagcctgggcaacagagtgagactccgtctcaaaaaaaaaaagctatgttttttgtttgttttttgagacagggtctcgctctgttgcccaggctggagtgcagtggtgtgaccaaggctcactgtagcctcaacctactgggctcgagtgatcctcccaccttagcctccccaagcactgggattacagggaaagagttcttatcttttattattgttgttgttgttgttgagagacagggtcttgctctgtcacccaggctggagtgtggtggcaaaatcatggctcactgcagccttgacctccccaggttcaggtgatcctcccacctcagcctcctgagtacctgggaccacaggcatgtgccatcaagcccagctaatttttgtattttttttagagatggggtctccctatgttgcccaggttggtctcgaattcctgagctcgagcagtccgcccacctgagcctcccaaagtgcttggattacaggcatgagccaccgcacccagccatctttcttatttttaaaaaacttattattattactaaaaatacaaaaattagtggggtgtgatagcacatgcctatagtcccagctactcgggaggctgaggcaggagaatcacttgaacctgggaggttgcagtgaaccaagactgtgccactgcactccaacctgggcgacagagcgagactccatctcaaaaaaaaaaaaaaaattatttgtccttttttcagagaaatactccctgatttctgagttctcccagaaccctaccacacagttaattcttcctcttcatcatttcttgctcaacttaaatgtaatttcctcagaatgaccttcattgtgagccccgcatccaatataaagccaatctttttattgtctaagagctccttctacattcccaaggcagctctcatcccaatttgtaattatgttcagttctttgtttacttatcatctcctctcttttccattaaattttaatgtctaaaagtacaagaaagtggtcttttcttattaaaacattataggtagctgggcacagcagctcacgcctgtaatcccagcacttgggaggccaaggctgggggatcacttgggcccaggagttcgagaccagcctgggcaacatagtgagaccccccctctctacaaaaaatataaaacaattagccgggtgaggtggctcatgcctgtagtcccagctacttaggaggctgaggtggaaggaatgtttgaggtcaggaagtcgaggctgcagtgattcgtgatcgcaccacagcactccagcctgggtgacaaagccagactctgtctctaaaaaacaaacaaacaaaaagcaactttatgccccatcactagcacactggtagctacatcatatgtgtccaaaattctgagtgaagaaacgaatgaattaccaaagtatcaatttcaccttctctgtattgcccaaatgatcacttagctctactttgcaaccattaagagcctagattaccatcattcatttcctaaccccgctaataatgccttatcttgtctctactcagtcatgcccgtccttcttacagtccatccccaccatctagctaattctgctaaacaccattattctttaaagatacacaaatatttttgaaaaaaat[136 bp omitted]cggtgaaactgcgtctctactaaaaatgcaaaaatttagccgggcgtggtggcgggtgcctatagtcccagctactcaggaggctgaggcaggagaatggtgtgaacccgggaggcggagcttacagtgagccgagatcgcaccactgcactccagcctgggtgacagagcgagagccatctcaaaaaaaaaaaaaaaatcacttgaaagtgagagagtggatggggcaggactggccatgagtggctggttattgatgttggacatatggagttcattccactattttctatattttattggtgttcaacattctttaactaaaaaaacatttttcggctgggcgcagtggcttatgcctgtaatcccagcactttgggaggccaaggcgggcggctcacctgaggtcaggagtttgagagaacagcctggccaacatagggaaaccccgtctccattaaaaatacaaaaaaattagccaagcgtggtggtgcatgcctgtagtcccagttactcaggaggctgaggcaggagcatggcttgaacccgggaggcagaggttgcagtaagccgagatcatgccactgcactccagcctgggtgacagagtgagattccatctcaataaataaataaacattttttgtggatgtttaattctctcagccagcctatgaaggagctactgtcacaggaaaggaacagaacataattaaaagctaggttctaaagtcagactacctgggttctaattctctctctgacagtcacaagctataagatttttcaggctgggtgcagtggctcacaactgtaatcccagcactttcagaggcagaggtggaaggattgcttgagctcaggagtttgagaccaacctggccaacatagttagaccccaccttacaaaaaagttgccacgcatggtggtgcatgcctgtgatcacagctacttgggaggctgaggtgggaggatcacttaagtgcacaaggtcaaggctgcaataagctgtgatcatgccactgcactccagcctgagtgacagagtgagaccctgtctcaaagagatttttgaggccaggtgcagtggctcacgcttgcaatcccagcattttgggaagccgaggcaggaagatcacctgaggtcgggagttcgagaccagcctgaccaacatggagaaaccctgtctctactaaaaatacaaaattagctggacgtggtggtgggaacctgtaatcccagttactcgggaggctgaggcaggagaatcgcttgaacccaggaggcggaggttgtggtgagccgagatcacaccattgcactccagcctgggcaacaagagcaaaactccatctcaaaaagaaaaaaaaaaagatttttgatttcccatgcctgtttccttttcagtaaaatagagaaaatagagtacacatgtcaaagggtgtttgtgaggtttcaataagctaatctatgaaactcagtgcttgatgaatgaatagtaagtgcttgataacataccctaaggtcagtaatattattcccagttaacaactaggggccaggcacagtggctcacgcctgtaatcgcagcactttgggaggccaaggtgggaggatcatttgaggtcaggagtttgagaccagcctggccaacacaatgaaagcccacttctactaaaatacaaaaaaaaaaaaaaaaaaatagccaggcatggtggcgtgcgcctatagtcccagctactcaggaggctaagacaggagaatcacttgaacctgggaggcagagtttgccatgagatgagattgcaccactgcactctagcctgggcgacagagtgagaccctgtctcaaaaacaaaaaaacaaacaaacaaaaaaaccctgctgggcgcggtggctcacgcctgtaatcacagcactttgggaggccaaggcaggtggatcacctgaggtcgggagttcgagaccagcaagaccaatgtggagaaagcctgtctctactaaaaatacaaaaaaattagccaggcgtggtgactcatgcctgtaatcccagctactcaggaggctgaggcaggagaatcacttgaacccgggatgcagaggttgcggtgagccaagatcacaccattgcactccagccagggcaacaagagcaaaactccatctcaaaacaaacaaagaaacaaacaaaaaacccctaaggcacagagaagtgaagtaacatgttcaagggcacgcagcaaggaagaggcaaagtcagcatttgcctggagctcccggacatccaagtggccccattccacacaatctcccagggtctgaccgcccacatccccgctcacctggctggtgtgattagcacccatttgcagcaacatgtggacacaatccagcctgtctcgggcctgtgtgctcagcacccggggacagaggtcggaagggcgcatagcaacgttaagggccaggatggccgtgtggagcggggtgaggcctgcagaatggagacagtgagggacccgcatctgcacccacctcgcccagccacaccaaccacaccagccctgcccacacccaacttaccctcgaagtctctggcttccaggtcaacctggaccccagagttaagcacagcctgggaggaagagaaggcagactgctgggtaagggtatcccctggcctcctggccctggaagccaaaatctgggcaaccagtctaccccccagacaaacccctgcctgccagctggccataccaagagaactcctgggagcccgtaggtagcggccacgtgcaagaccgaacgtccctgatggtcagcggcattgggctctgctcccaggttcaacagatcctccacaatcaggggctggttggcagcagccgccaccaggagaggggtctgcaggccacaggagaagtcaggttgggctcctggttccctcccgtcagaaaaccaggctcccagccccatcccccctcagccccaggagctcaccccccattcccctcttctctaggatccaggggtccaggccccaggctccttcctcccctgaacccaggagagttcaggccccaagcctcaccttgcccttatgctcacgaatgtcaagacgccggtacacctggagcacctcagccgcagcatatgccgcccagcgcagcccccgagccgcaaacaggtgaaggagcctgaggacaggtgggggacagccgtgagaacagcccccaccaagccaagagtctgcagacaaccctatcccttatactcacgtgtccccctcctcatcctgggccagcagctgctgtggccccaaagccagcatgtgagctcgggccacctccagcgatggtccagggaccacagcggggaactgtgggggtcctgaagggggtgcagaaactctccagggtccagcctgtggcagagaagatcctacatagaactgggtgtctggggggtcctggagggtgcaggtggtggggagacccagtcagctgagaattcctccatcccaagccaccacacacacatctgcatgcagagcccctgggtatcccatctatgccaagtgaccttggacctttaggcctcagttttgcccacctggaaaagggtatttttttttttcggtgacagagtcttgctctgtcacccaggctggagtgcagcagtgcaatctctactcactgcaatctctacctcctgggttcaagcaattcccctgcctcagcctcccgagtagctaggattacaggcgtgcgccactacacccagctaatttttttatttttggtttcaccatgttggccaagctggtctcaaacgcctgacctcaagtgatccgcctgcctcagcctcccaaagtgctgggattacaggtgtgagccaccacgcccggcctggaaaagggaatcgtaactgagctccagacatctcagaatactgcaggagtgcaactgcgaatttttaggggcccttcagcatcctgtacccactctgtatctcacctccatgccctggggaaatgggcacggctgccctgggtccgagggtgggtagaagtcaggaggcaggaaattttcggcagcagaagcagggcaagagtaggggctgtcagtgtaggcagcatgcgtgttggggtcccagtctggaaagcccaggctgctaggtccagaacccacagtctccgagtgtgctgggaagggagggtggcctgcgtgtaagaggaggggcaggggcaggtctggttaccagagttggggacgtcacatccagggctagagggcctggcgtctcccaaggtactgagagttagtacttctgggacaccaagctcccgggacctggattcctgggacactgaggaattgagggcctggactcctggggcactaaaaaggctgagcctgggccctggggctccgtaggactatgtgcatagactactggactcaagagaacctaggaaatcagactgctactgagttccagcaagaatgagggcctaccagcctaggcaacatagccagaccccgtttctacaaaaatttaaaaaattagccaagcaaggtggcatcgcctgtggtcccagctacttgggaggctgaggcgggaggatcacttgagcccagaaggttgaggctgcagtgagccagatagcgccactgcactccagtgccagggcaacagagtgagatcctgtctcagaaaaaaaaaaaaaagggaagaatgagggcctgactcccaggtgtcccaaagttctgagagctgcgatgtctgagtcccttagggaagggggatggggaggccgggagctgagagaacttaccagtcacagcctcattcacagatggggtcaggggctgctctgggggagggagaaattgtccctgtagagacaaaagcaaaaaggaacccaggtgactttatctggcagattcctccgggtctgtctcggatctataagacatttcggtcaggaccacccctctcatcagccccgagggcccggcaagccgctgagtccctacgggacagcacggggcctccggagagctgtggctccctggcctcacctgcaccccgccagcgtcgggctgctgctgctggcggcgcctctgctcttccagaagcttcttcacggtttgcgttgggcagtggctgcgctcacccctgctcactgtgcgggagaggagagggggaagtcatcaagggtccttaagtcacctaaatgccgcgggggtggcgcgcggggagtgggtttgggcaccctcctcgccctcccgcgcggaaaaactggcacatagatgccgcctgactcctccaaagccattagaagatttggggtggggcatccgcctccgccgtttccttccttttgctccgcactttccctctgacccaactttccaccaccgtcgcggaaagtgaggaagggggaggagggcacccctctgcagcaaccaccccacttccgtaaaaaaattccacccccagatatccaagttttgaagtcagcgggttggtggggggccggcgccaggcgtcactccctagactcacatccaggttcccaacatttttttccctagaacctgacccggaaatcaggagtccccagcgcccctcctcgagaagtcaaaggcctcaccccgggccgggagcggtggctcacgcctgtaatcccaacactttgagaggccaaggggggcggatcacctgaggtcaggtggccaacatggtgaaaccccgtctctactaaaaatataaaaattagccgggcgtggtggcaggcggctgtatatcccaggtgaggcaggggaaacacttgaacccgggaggcggaggttgaggttgcagtaagcggagatcgcgctactgcactccagcctgggcgacagagagagactccattaaaaaaaaaaaaaaaaaaaaaaaaaggcccatccatacagtctctttttcaggccccaggaatctggaccctcagttccttcctctctaggacctgggagccccagttcccaaactccttcccacgactcagaaagacagaaccctcacccttccgagcctgggttccggcggaggaagggttaagtggggattgcgcggggcgggggcgggaggaggtggctcggaaacagccccgacgcggcgcgctgacgccacggcgctcacgcaagggaatcttccatcctccccttccccccaagtcctgtgccccaggtgtcctgctccgaggcggggcgcgcggccgatcgtggcgctcgtggaatccccgcgcaaggggaattcctgctcagccccgcacgggtggccatccggaaatcccagggcggggcagaggcagggtcaccgccagcgtagaccctgaggccaggctccggacccttccccaccgagacccacgccgattttaagcaaccacgccccccccccccccccccgcactcagcctagtccctgcttctaggggtaggagtctcggttgccagcaacccctagcacctccaaggacccagagatccagcctcccaagcctcccagcccttgcaccctcggggccctgcgatcctggatccccaggcccctgcacccccaggacccagaagtctgggatcccagccgcccctctgtcacgatccacgatcccctcctcctccaaacacctagggccctcactctcgggataaaggactgacgcttcagctccgtccctcagggcctcgggagtctttcgatcctcagtccctcactctcttagggggccgaacgcgtcctgcccgcgcccattacctcggggattccgtggcgtggattgcgggcccccagggccgcggcctcggcgctgcgccagcctcgctgtttcccccgcggagccgccgccgggtccccgatcttgggtccggtacccgcgagtttttaaactaggggttatggcaccgcccagtcctgggcagggcccgcccacaggcctgggagtccccgggtcgcgctccggcgaacgcagtccctgaatgggcgcggcggacttgggaggcggactactcagtccccccgggaaggagggagctggggtccagatctttgctctgaaggagcctagggcaccgggctccaagaggagggagaaaccggggggcctggatttcttttcttttctttttcttttttttcttttcttttttttttttttttttttttgttgttgtttttgagaaggagtctctgtcgcccaggctggagtgcaatggtgcgatctctgcaaactccgcctcctgaattaaagcgattctcctgcctcagcctcccgagtagctgacactacaggtgctggacaccatgcctggctaatttttgtatttttaggagagatggggtttcaccgtgttggccaggctggtctcgaactcctggcctcaggtgacccgcctgccttggcctcccaaagtgctgggattacaggcttgagccatggtgcctggctggggcctggatttctgggtctgtgtctaagggggtgctggaggctttgtctcctgggtcctgcccatgggggtaggggtaggagtggggatggagatggggtgggggcagggagaatattactgggtccagagggaggcaggactgggggtctagactcccagaggaagggtctgtgggtaagggtatagggtgtggctcaatttctccctctcccctacatcaccctttttagaggtctggtttcatttactcattcatcatttaaaataatttattgcagcagaggaggcattttgctgtgtattgtgaactaagcaggcaggaattcccagccctggagctggcattccagtgggaggccactctcagtttcacttggtgacctttcacagcactgaccatgttggccctatttctcccctgcttgcttgcttttctattttattttattattacatttttattgttagagagagggtctcattctgtcgcccaggctggagtgcagtggcaaagtggtgagatctcggctcactgcaacctccacttgcctcagtctcccaagtagctgggattacaggagcctgacaccatgcccgggtaatttttgtatttttgtagagacggggtttcaccatattggcttgaactcctgatctcaggtgatccccccaccttggcctcccaaagtgctgggattacaggcatgagccactgcggtggcctctcccctgctttcaagatgccatgctctcaggggtcccctccctctttctccatttccctggcaaagttcctcctcttcccccattcagtgtgtgttgtgataggggcagaatcctgtctgcactcacttccttggtgatctcacccagtcttgtggctttaagtaccatccataagccatcaacccccaaatttacatctccagaccagccttatcccctgaactcctaaatgcagtgaggttattcagcatctccacagggagattgtcaggcatttccaaccctgtatgcccaaacctcgtcactttccccgcaaacccacttccctacctttcatctctgccagcagacactcccatcttctcagcgtttcatgccagaaggcttggctgtctaggatccctctcaaacacacccacattcatttaatcagcaaattttcttggccctacctccaaaatatttccagatctccctagcctgcacacccttgccacctgtcattcccacttggaccaggccagcagcctccctggtctctctgaccctccccctgagttcgttcaccaaaggcagtaacggagacaccccctcaacacacacaggaagcagatggccttgacaccagcagggtgacatccgctattgctacttctctgctcccccacagttcctctggacttctctggaccacagtcctctgccagacccctgccagaccccagtccaccatgatccatctgggtcacatcctcttcctgcttttgctcccaggtgaagccagtggttacaggggatggtaggcagagcgtttgtgagatgggtgcttgggtgacgtctgcagggacgggtgatgaaagtggggttcttctccctgcaccccttcccttctgggagatccattctgcttcagggcctgggtccttgggggcggaagggggtgagacagggagttctggaggggctgcctgttagcgtccccttctcatggctgggtctctgctgccacttccaatttcttgtcactctccatgtctctgggagtccccttcccatgtggtcctgttccatctctccagcctggagattacttctcaggacactacctttccttctctacaccctattttttggtttgtttattttgagatggggtcttgctctgttgtccaggctggagtgcagtggcacaatcacggctcacggcagccttgacttcctgggctcaggtgatcctcccagctcagcctcccgagtaactgggattacaggtgtgaaccaacacttccagctaatttttgtatttcttgtagagacgaggtctcactatgttgcccaggctggtctcgaactcctgggctcaagcgatcttcctgcctcggcctcccaaagtgctgggatgacaggcgtgagccacggtgccaggctgagcattctgttttgtggaccttctctccaccctcatccaccttctttctctttccacagtggctgcagctcagacgactccaggagagagatcatcactccctgccttttaccctggcacttcaggtatcacttccaccccagaagcttggccagaggctcccagaacaccccagtggttctccaggtcaccatcccacctcccgtccccaaatcagaggatccgtgtccttctccgagtcccagaatcagcgacccccagcctgtgttcaggagcaccccgtgtgcccgccgcacagccccgagggtcctgggacaccccagcctctctgcatctgtctcccgtttcattccccaagcgcaactccaaggaacctgggacccgccccctcgcaggggacttcctctctgcctgtggccaaagcacagccccaggacgcagagcttgagttgtctccctgttccggcccccactctccaggctcttgttccggatgtgggtccctctctctgccgctcctggcaggcctcgtggctgctgatgcggtggcatcgctgctcatcgtgggggcggtgttcctgtgcgcacgcccacgccgcagccccgcccaaggtgagggcggagatgggcggggcctggaaggtgtatagtgtccctagggagggggtcccagggagggggcccttggggaagccctggaggaggtgctggggaaaccctgggggaggtgcctgggggaacccctgaggaaacccctgaagcagggggtccccagggaagtggagatatgggtggtcaagcttcatgctttctctcccctatccccagaagatggcaaagtctacatcaacatgccaggcaggggctgaccctcctgcagcttggacctttgacttctgaccctctcatcctggatggtgtgtggtggcacaggaacccccgccccaacttttggattgtaataaaacaattgaaacacctgtagtcgtattctttctcaaagaaccccagagttcccaaagcctccctcccatgaactgtttctggatccaaggccccctcagaacccccacatgtccccatcccatcagcccaaggatctggcataatgtttttgtgcttcatgtttattttaggagagtattggggagcggtctggtctctcagggatggcactctgtgggtctgtatcgcggtaggagttggaatgaggtgcagggtgggcttcaggaatggctggatccaggtatcatgttgctgactgtcatgattcgggctcatttgtaatacggcctctgtgtgttgaggtcgctgtagacatccgacctctgaccctggagctcctaaaggaatgggggccatcagtggaagggacccaccaaataaaatccagccttctcccagtggcctgcaaggcccctggcagcttcttcagccttatagccatgaaagagatccggattttattcaagtacattcaatgttcccccttctcctctgcctcatcagtgtgccccagcctcagggtccctgcgtgtgctgtttcctctgcctaaaactctgttcccctagatcccctctcccttcaagtctcagctcacgtcacctcctcagagaggcatttctcaatttcccctctgtagtttcttccccccacactccagccactgtaaaaaaaaaaaaaaaagcctgtttatttcctttactgtgcctcccaaaattattttatttgttcatttgctttaagtttgtcttaactaggatataaactctgtcactgtgtccccagcatttagcacttataggtgctagacacatccacagagggaataaatacatccgggtaatgctttgccctaaaatttcactgccaccagtaactggaagggcccctcggtcttctggatatcacagagccaaacctgagattcttagacttcacaaagaaactttatccacaagtgaggtgaataggcaaagctggttgcagacaatatatcagacttcacacagcagtgttcacacttggggtagggggaggatctatgtggcccccaggggcaggcctcagacagaaaccctaaaatcatatatgatgactagtctgggcgtgcattcttcaggggagaggtcttagagaatctcatgaccccctaaagggttaaaaaggaacattgacagagagggggatagatgactagattctcttgtatactctatagtttttaaaaagagcttcagccaggcatggtgactcatgcctataatcccagcactttgggagaccgaggtaacaggatctcttgagcccaggagtttgagaccagcctgggcaacatagtgagaacctatctctactttaaaaaaaaaaaaaaaattaaggccgggcgcggtggctcacacctctaatcccagcactttgggagggaaaggtgggcggatcacgaggtcaggagattgagaccagcctggccaacatagtgaaaccccatctctactaaaaatacaaaaattagccgggtgtggtggcatgcacctgtagttccagctactcgggaggctcaggcaagagaatcgcttgaacctgggaggtggaggttgcagtgagctgagaccacaccattgcactccagcctgggtgacagaatgagactccatctcaaaaaaaaaaaaaaattaaagtagagaaagaaaaaagagcttcaagaatactcaaccagcatggttgcttgagcctgtaatcccaagattttcggaggctgaggcgggaggatcacttgagactgggagtttgagaccagctggggcaacatagtgagacccctgtcttttttttttttttgagatggagtctcactctgtcgcccaggctcactgcaacctccgccccctgggttcaagcgattctcttgcctcagcctcctgagaagctggaattacaggcgcatgacaccatgcccagctaatttttgtatttttagtagagatggggtttcaccatcctggcctggctggtcttgaactcctgacctcgtgatccacccaccttggcctcccaaagtgctgggattacaggtgtgtgccaccatgcctggccaaaaaaaaattttttttaattataaagaacatttacactgctctcagattatatgcacaattttgtattttttgtgtagatttttctgggagtctagattttcttagtttctcaaagggatgaagggtcctcaaacccaaaaaagagattctaggactcctctctttagagttaccaaggtagggctgaatgacattctctgccctactgagagcgtctcccagaaatcagtcgtcctagggctgggtttcttccagaaaattcctggcctgacttctggcaaggcctgtgtttacacttacaaaggcaaagccacccttttttttttctttttaactcttcacgcttttttttttttgacagagttttcctcttgttgcccaggctggagtgcaattgcgtgatcttggctcactgcaacctccgcctcctgggtcaaaggattctcctgcctcagcctcccaagtagctgggattacaggcatgcgttaccacgcccagctaattttgtatttttagtagagacagggtttcaccatgttggtctcgaactcctgacctcaagtgatccacccgcctctgtctcccaaagtgctgggattacaggtttgagtcaccgtgcccagcccctcttcacacattttaagctgaccataagcttgtggttgatcattcggcccagttttggacagatgtcccatgtgccttcaaggtttgggggtgctttaggcagagtggctttgaggtccctctgatggcatgaaggagtatctggggcagatatccctggcaggagtgaaatgtgaggaggacagtctggttttctcacctgataaggcgactcggtctcagtgatacgctgtttccgggtcgctgctggaggtgaggggtgttgtggggtgcagagacaggcagagtggtgagttgagggtgttttgtcattccaaatcagcacctccattaccatccctttggatgtttgagatctgggagtttacccagccccccacccccatctaggcaagtcctcaggatgtcccctgctagccccactcaccctccgcagcccctcgcccccgagggaccagccggcccaggaagtacacggccagggcaatgagcactgtcagcaccaggtctcccatcacgatccctgccagcacgcccgggctcaccgtagagcaactgcaatctgcagcacaggggtcaggggaggtcagtgtgtgctgggaactgtggggaggggggtcagcggcagggaggtttggaaagggtgtgggagagacggagacagggaggtctctgggaggtagagagagggactgctgggtctaggcctaccgctctgggcctgggcctggacaggacggagacctgaggaggaaaaagaaggtaaactgaggcacagagttatgacgggggtgggggaggcaagtttagaagccagggaaggtggatcctgacagccaagaggttagcaagggggagagcgtgtctggcgggactcagggggctggcgtctgggccaccggactatgtgcgttacttctgcacaacttgtcctgtggcaacacacttagatgtctcttctcccctgcttgtagcggacgacaaaacttgggggcttgggctctgggagaaacccacaggctttgggaggttggggacctgctcccatcccaacacccacttttggttctctcgttccaccccactccctgccctgccccaagctgagcccagggacccgggaggcagccacggaagcccctaactcaccacttacagccagcaggagaggcaggagcaggagcctgctgcagggttcaagtccccccatgaagccggatgctgctggacaccacagtgtaagggccggtgggatgtggcgcagcgtccaggcaagtgaaggaggaagtctgaggcgggtggtggcagaagggaggaggagacaggggaggagagacagaaacaaaacccaagaaagaatcaggcccagacacccaggggccatgccacaggcccccagcaactagacgtgaagggcaaagggtacgtgaagcacaaacttcacctccgtccccagtcaggggtcagacatcgttttaacaggagggtcagtgtcatgaccttcctctggctgattgaaaccagctctgcctcttcctggctggtcaaccttgagtgcaatggcacggtctcggctcactgcaacctctgcctcccgggttcaagtgattctcctgcctcagcctcccaagtagctgggattataggcgcctgccaccatgcccggctaattttttgtatttttttttcttttttttttagtagagacagggtttcaccatgttggccagctggtctcaaactcctgacctcaggtgatccacccaccttggcctcccgaagtgctaggattgcaagtgtgagccaccgcacccagctccaacctcagtttcttcatctgtaaaattgggagtaaaatgggacctactttttagagttgtggggattaaatgaattaaagttcctagaccagggtctgacccttgtcagctttttaaaagcatcagctatgatgatgattatttaatcatcagaaacttgtgctgtttaaaggatattaaaagagccagcagcatgtgggcactaatgacatgcaggcactctgtcccaagcgttaaatcattcagtccccgcaatgcccttctagggcacatgctcttatcatccccattgttcagagaggtagagacgcttgcctaaggctgcacagcaaatcaaggtggaaatggaacccaagacccaaaatcaggtttttgactagggaagagtcagggggaaaaacaaagatgaaagatggggaaggagaaaacagcggcaaagctgagaaaggtgagagtaaggcagtggcacagacacagaggcacggctggcggcttggggagaggcaggtggctggctctcctgctgaatgaggaagtggctgggagcaaggcccaagggaggccaccccaaggagacggggacttctagcccccagctggagcctggggctggggaaggaggaacctgaggttagggtgctggaggatgagacagctgcaggaagcccccctcccccatccacacgtcacacccaccgctccttgggcctgggcttaggagaaaaaaggggaaactggattctggtcacagggcagatgcccagtggcctgtgggggaagggaggagaggagatttggagcctggaggagggtcaggtcccagctcagcccacggtcaccactgttcaggcctggctgagtcccctcccttaaaaacccaagcctctcccattgtgtctagagcgagcatggagggaacagaccctgtaggtcctcccgggcacaccaggccacccaatgtgttggagcagagtgggcgagggggcagtcagagaccagagcagggctctgagccaggagggccctgacctgactcaggggttcacaggttccctccggccgcaggtggggagcagactgtggaggcagggactggagcagggaggccaggctgctgggatatttgtgaggatattgtgaggtctattagaataatgcctggttgagttcaagaccagcccggccagc[131 bp omitted]gaaacccggtctctactaaaaatacaaaaaattacctgggcatggtggtgggcacctgtagtcccagctactcagaaggctgaggcaagacaataccttgaacctggaaggtggaggttacagtgagctgagatcgcgccactgcactccagcctgggcgacacagcaagactctgtctcaaaataatgataataataataaagggccaagcgcggtggatcacgcctgtaatccaacactttggaagaccgaggtgggcggatcccctgaggtcggcagttcgagaccagcctgaccaatatggagaaactcggtctttactaaaaaatacaaaattagcctggcgtggtggcgcgtgcctgtaattccagctactcaggagcctgaggcaggagaatcgcttgaacccaggaggcagaggttgcagtgagcagagattgcgccattgcactccagcctgggcaacaaaagcgaaactcagtctcaaaataataataataataataataataataataataataataataataataaactttcactcctgctctaaaacttaccttggtttctcactctgccttatgtcccttggtcaaattcttttttgaggaggcaaggattgaggttgctgcagacccctatggattcactgctgcgaacatacttcggtaccgtgtgacttggatatgttccatgctaaaaattagtatgtccagtctcgagttctcagcttagcttgataaaaatcctccctcagccaggtgcagtggctcacacctgtaatcccaggcgtgattttggattttgggactttaggaggccaaggagggtggatcacctgaggtcaggagtttgagaccagcctggccaacatggtgaaaccctgtctctactaaaaatacaaaaactagccagacatggtggcaggcgcctgtaataccagctacttgggaggctgaggcaggagaatcgcttgaacctgggaggcagaggttgcagtgagccaagatcatgccattgcactccagcctggatgacaagagtgagactttgactcagaaaaaaaaaaaaaatcctccctcagtccttcagcatcagcctcctagtctcatcctccccacttcagccaggcctgggctgtccccagaagatattccccaagcaccatccagtcatacggatgtggccataggggctggaatcagggtcctagagcgccacctttagttgctgagatgtgggaaagtccaaggggtccccaaagaatggactcgggtggtagcagacatctgtgggctatgtgggctctttactaaccagaagtggaatgtttcaacattttagcaaccaatacaactgtgctgatgcagaccacaggtggcaggtctgggctggcctctgggctagaggacggataaaacactctctttggccaggcatagtggctcacacctgtaatcccaccactttgggagactgaggcgggtggatcacttgaggtcaggagtttgagaccatcctggccaacatggtgaaaccccgtccctgctaaaaaatacaaaaattagccaggcgtggtggtacacatctgtaatcccagctactcaggaggctaaggcaggagaatcgcttgaacctgggaggcagaggttgcagtgagccgagatcgcaccactgcactcaagcctgggcaacagagcaagactccgtctcaaaataaacaaaacaaaacaaaacaaaaaaaccctccctctttggatgaaggaagaagctgagattcagggcacccagcaacaaggcgctgccccaagacactgccagactcctggaagctgagctgagggcctccacacaagatcaagaggtgagtgtctcaccctctctgggcagcaggccaagagttggggaagccaacgctgactttcccagaaaccaggtagtgtgttggcctgtgaccagctcacttctgtggaagctacagtccctccccactctcccagcttccacactggcccctccacagcctgtcctcctcaaagcagctggaagctttgtaaaacatcagatgaatagaggccaaggcagaaggatcgcttgaggccaggagttcaaaaccagcctgggcaacataacgagaccctgtctctaattcttttttttttttttgagatggagttttgctcttgtcgcccaggctggagtgcagtggcgcgatctccgctcactgcaacctccacctcccgggttcaagcaattctcctgcctcagcctgccgagtagctgggattacaggcatacgccaccatgcttggctaattttgtatttttagtagagatggggtttctccatgttggtc[132 bp omitted]gcctgtcatgccaacactttgggacaccaaggcaggcatattacttgacctcaggatttcaagaccagcctgggagccaggcgtgatggctcaagcttgtaaatcccagcactttgggaagctgaggcaggtgaattgcttgagcccagaagtttgagaccagcctgagcaacagggcaaaatcccagctctacaaaaaatacaaaaattagcccagcatggtggcacctacctgtagtcctagctactagggaggctgaggtgggaggatcacctgagcctggggaggcagaagctacagtgagctttgattgtgccacagcagtccagcctgggccacagagtgagaccctgtctcaaaaaagaaaaaaattaattaatttaatttaaaaatcagacaaatagcctaatttttaagtgaccaaaacatttgaacagacacttcactaaagatgagacgtgaaggccgggcgtggtggctcactcctgtaatcccagcactttaggaggccaaggtgggcggatcacctgaggtaaggagttcgagaccagcccagcaaatatggtgaaaccacatctctgttaaaaacacaaaaattatctgggcgtggtggcagtttcctataattccatctactcaggaggctgaagcaggagaatcccttgaacccaggagacagaggtttcagtaagccgagatcgcaccgctgcactccagcctgggcaacagagcaagactccatcaaaaaaaaaaaaaaaaagccagcgtggtggctcacgcctgtaatcccaacactttggaaggccaaggcgggcagatcacctgaggtcaggagttcaagaccagcctggccaatatggtgaaaccccatctctactaaaaatacaaaaattagccaggcacggtggcaggcatctgtaatcccagctgcttgggaggctgaggcaggagaatcacctgaaccttggaggcaaaggttgtagtgagctgagatcaagccattgcactccagcctggacgacaaaagtgagactccatctcaaaaaaaaaaaaagaagaagaagaagaagagacatgaatggccaggaagcctgtgaaaaagtgctcagcactattagtcattagggaaatataaacgaaacctcagtgaaatgtcactgcacgcccacttaaatgactaaaattaaaaagactgaccctatcgagtgtcagcagaaatgtggagcagttggaaatctcagacactgccggtggaaatgaaaaatagagcaaccgctttggaaaatagtcggttgtttcctttaaacattctgcagtagctcacacctgtcatctcagtgccttaggggactaaggtgagaggatctcttgaggccagaagttcaagatcagcctgagaaacatagcaagataccatatttacaaaaattgttcttttttttgagacagagtctcattctgttacccaggctggagtgcagtggcacgatctcagctcactgcaacctccgcctcctgggttcaagcaattttcatgcctcagcctcctgagtagctgggattacaggcacccaccaccacgcccggatagttttttgtatttttagtacaggtgggctttcaccatgttggtcaggttgttctcaaagtcctgacctctggtgatccaccctcctcagccccccaaagtgctggaattagaggcgtgagcaactgtgcctggcctaatttttctatttttcatacagatgggctttcaccatgttggtcaggctgatctcgaactcctgacctcaactgatccgcctgcctcagcctcacaaagtgctgagattacaggcgtgagccactctgcctggcccaaattttttttttttttttttttttttttttgagatggagtctctctctgccgcccaggctggagtgcagtggctcgatctcggctcattgcagcctccccgtcccagattcaagcgattctcctgcctcagcctcccaagtagctgggattacaggcatgagccaccacacctggctaatttttgtatttttttagtagggacagggtttcgccatgttggccaggctgttctcacactcctggcctcaagcgatcctcccacctcagcctcctaaagttctgagattacaggcatcagccaccatgcctggcccccaaaattgttttaaattagctaggcgtggtggagcacacttgtggtcccagctactcaggagtctgaagcaggaaggttgcctgaacccagggattggaggttgcagtgagctatcgtggcactactgcactccagcctgggtgacagaaggagaccctgtttcaagagaaagaaaaaaggaaggaagaaggaagggagggagagagagagaaagaaagaaggaaagaaaagaaagaagaa[143 bp omitted]gaaaccctgtctctactaaaaatacaaaaatattagccaggcatggtggtgggtgcctgtagtcccagctactcgggaggctgaggcaggagaatggcgtgaacccaggaggcggagcttgcagtgagccgagattgcgccactgcactccagcctaggcaacagagtgagactccatctcaaaaaaaaaaaaaaaaaaagaaggggatgtgtgatgtgttcaatgacattagggaacccactgaatctctaggaggtccaagaaatcagtccctgagctacacagatcagatcctactcctgccttggggagcaaacacctcagctccactgctaaagtgatctgggaccttctgtgaaggcttctgtcatttgcatcagacactgggggaagtttggcaatttctaagaaatttaaacataaacacaccatacaacccaacactcccactcctaggtatttaccaaagagaagtgaaaacgtgagtttatacaaaaaccagtaccatatattaatagtggctttgttcataattgccccaaactggaaacaaccgaatggttcttcactggatgaatggataaacaagttgtttatccatttttttgagatccacacggtgggatactactcagcaataaaaaggaatgaactatttttacttatctttttattggagaaagggtcttgctctgttacgcaggctggagtgcagtggtgcaatcatggctcactacagcctcaacttattgggctcaagcgatcctcccactttagcctcccaagtagctgggactataggtgcgcatcaccatgcccagctaatttttatatttttcatagagatgatgttttgccatgttgcctgggctggtcttgaactcctggcctcaagcgatcctcccacctcattctcccaaagccctggaattacaggtatgagtcactgcacctggcctcaccaatatttttttctccccttcttcttctataggtgtgagccaccacgtctgttttttttttttgttttttttttttttttgagatgaagttttgctcttgttgcccaggctggagtgcaatggtgcaaccttggctcactgcaacttctgcctcctgggttcaagcgattctcctgcttcagcctcctgagtagctgggattacaggcatgcaccaccatgcccagctaatttttgtatttttagtagagacggggtttcatcatattggtcaggctggtctctaattcctgacctcaggtgatttgccagcctcggcctcccaaagtgttgggattacaggcgtgagccaccactcccgacatcctaatttttatttttatttttttagagatgtgatctcactctgtcactgaggctgtagtgtactagcaggaacatagctcactgcagcctcaacctcccaggctcaaataattttcccacctcagctctgcaagtagcagggactactggcaggcaccgccatgccagctaatttttaaatttttttgtagagatagtgtttcaccaccttgcccaggctggtctcaaactcctgagctcaggcaatccacctgccttggcctcctaaggtgctgggattacaggtgtgaacccccttgcccagccaccccttcctctactgaaacagaatttgtagttgggcatgagattccctagccaagaagatgtctctcatcctctttggagcctgttggggccatgtatctgttttctggcaaacggaacttgggaagaaatgatgcgggcaacttccagattgtgtccctaaagtcagagtatgccctctccttttctgctcttcctattggctggaatgtggcccttattctggctgtgggcacccactttaaccacaacagctaacattttgaaggctttttaagtagaatccaagtaatgcttgatggtttcatcaattgtggttcatccataacataaatagagtcatggccaggcatggtggctcatgcctataatcccagcactttggggggctgaatcaggaacctcaattgtggccaggagatcaagaccagtccgggcaacatagcgagaccttgtctacgaaaacaaacaaacaaacaaacaaacaaacacatcagccgagtgtggtggtacatgcctgtagtttcagctacttgggaggctgagataggaggatcacctgagcccaggaggttgaggctatggtgagtcatgatttgattgggccactgcactccagcctgggcaacaaggacagagcaagactctgtctcaaggggaaaaaaaaaaaaattaagaacttgccacagtggctcatccctgtaatcccagcactttgtggggccaaggcaggaggattgcttgaggtcaggaggtgtagaccggcctgagcaacatagagagacactctctctacaaaaaaaattaaaaattagccgagcgtggtggcacacacctgtagtctgagctacttggggggctgaggtgggaagatcacttgagccctggaggtcgaggctacagtgagccgagatcacgccactgcactccagcctgggtgacagagcgagactctgtctcccaaaaaaaagaattaatggccgggcgcggtggctcaagcctgtaatcccagcactttgggaggccgaggtgggcagatcacaaggtcaggagatcaagaccatcctggctaacacggtgaaaccctgtctctactaaaaatacacaaaaaaattagccaggcgtggtggcgggcgcctgtagtcccagctactcgggaggctgaggcaggagaatggcgtgaacccaggaggcggagcttgcagtgagcggagatatagcgccactgcactccagcctgggcgacagagtgagactccgtctcaaaaaaaaaaaaaaaaaaaaaagaattaacattcaccaaaagatatcttagaatgataatgtggctatatatttagatctatattttaaaaggtcattattacttagcgatatgtacttcctacaaatttgggaggtgaaataataagacgtctggaaagtgttaaaagcaatccaataaagaagaagtaggttcaggtagagagggaataagattagcacgaattgacaattattaaagctggcaataagtctatgggaattcattatacgattctctctacttttgtgtatgtttgagattttttattaaaaaaaagataaccattagaaaatggttacagagtaggagaagaaatttgtaacacataatgcaatgaatctgaacatatcctgcacacataaataactccttaaaaacaaacagcaaaccccagaagaaaaattggcaaactcaagtagacacttaattaattaatttaatttattttattttattttttggagacagtctcactctgtcacccaagccggaatgaagtggtgcaatcttggctcattgcaacctccacctcccaggttcaagcgattctgctgcctcagtgtcccgaatagctagaattacaggcacatgccaccacacccggttaatctttgtatttttagtagagacggggtttcgccatgttgaccaggttgttctcaaactcctgagctcaggcaattggcccaccttggcctcccaaagtgcttggattacaggcatgagccactgcatctggccaattgatttatttatttgaaacagggtctcactctgttacccaggctggagtagagtggcagaatcctagctcactgcagcctcaacctccctggcctaagccatcctcccacctcagcctcccaagtaactaagaccataagtatgggctactatgcctggctaatttttaaatttttttagaaacagggtcttgcccaggctggtctcaaactcctgggctcaaggcgtcctctggccttggcctcccaaatttcggggattgcaggcatgagccacttcaagcaagcacttcagaaaagaggaactctaaatggcaataaaggtgtgaaaaggtgctcatcctcagaaggagaacaaacattaaaacaatgtaaggcctggtgcagtggctcacgcctgcaataccagcactttggcaggcggaggtggaaggatcacctgaggtcagtagttcaagaccagcctggccaacatggcaaaaccccgtctctactaaaaatacaaacatagccggcatggtggcacatgcctgtaatcccagttacgaggccgaggtaggagaattgcctgaacccggtaggcaaaggttgcagtgagccaagattgcaacactgcagtccagagtgggcgacaagagtcagactccatctctaaaaacaaacaagactagtagcgcaaaaccgctccacacctttccctctacccctagaaatgtcgaaattttcaaaatccgacactaccagatgtggtgaaatgtggagccacagaaaatctcatacacctctgaaggaggcagaggggttgaaccactttgaaaaacagtttggcactttacttcccagagacccaacttccgcccctatctgtatctgagagagatgggtgcaatagatgccaggagccttgtgtaaggatagtcaccctatttgtaaggccaccctatttgtaaggcttttcaaaagaaacaacccaaatgcccatcgcaggagaaaggatacataccttggggcatatcacacaatggaataccgtgtaaccatgggaatacataccctagatccatttgccacaacatggacttatctctcaaagataatgttgagtggaagaagaaagaagccgcgggcacggtggttcacgcctgtaatcccaccactttgggaggccgaggcgggtggatcacgaggtcaggagatcgagaccatcctggctaacacggtgaaaccccgtctccactaaaaatacaaaaaattagctgggcgtggtggcgggcacctgtagtcccagctacccgggaggctgaggcaggataatggcgtgaacccgggaggcggagcttgcagtgagctgagatcgcaccactgcactccagcctgggcaacagagcgagactctgtctcaaaaaaaaaaaaaacccgcatacaagagtatatacaatatggttcctccttacatagagttaaaaaatagtccaaattagactacactgttttaggaagcatacatgtaaggcaacattattattattattattattattattattattattgagacggtctcgccctattgcccaggctggagtgcagtggcccgatctcggctcactgcaagctccgcctcccgggttgatgccattctcctgcctcagcctcctgagtagctgagactacaagcgcccgccaccacgcccggctaatattttttgtatttttagtagaaacaaggtttcaccgtgttagccaggatggtcttgatctcccgacctcgtgatccgcctgcctcagcctccgagagtgctgggattacaggcgtgagccacggcgcctggcctattattattattattattattattattattattgttgttattattgtagacagggtctggctctgtcacccaggctggagtgcaatggcacaatcactgcagcctcaaactcccaggttccagcaatcctcccacctcagcctcctgggtagctggtactacaggtgcatgccaccacttctgggtaatttttttttttattttttgtagagatgaggttcttactatgttgcccaggctggtcttgaacttctgtcctcaagggatcttcttgcttcagcctccccaagtactggagtaacaggcgtgagtcacctcgccctgccaataggtggcaaaataattaagaaaatcagaagtgttccatcagaaccaacatggtggttgcctttcaggggacagtacactttgtaaataaaaaggaacaaaagaggaatgttctagaatacatcaattacatttatttatttatttatttgtttatttatttatttatttttaagacagggtccccctctgtcacccaggctggagtgtgatggcacaatctcagctcactgcagcctcgacctctggggctcaagtgatcatcccacctcagctttccaagtagctgggactacaggcgcatgctaccacacccagctaattttttgtattttcggtagagacggggtttcgtcacgttgcccaggctggtctcgaactcctgagctcaggtgatccgcccacctctgacttctctcttcatgtggaagtagatgcctgaataattttactcaatgattcactgtgctgtgcatttgtcttcatctataggcattttgtatgtcacaacagataaagtttaaaagatctagccaggcatggtggctcatgcctgtgatcccagcactttgggaagctgaggcgggagggtcacttaagcccacaagttcaagaccagcctgggcaacatagcgagaccctgtctctacaaaaaaatttaaaaattagccaagcatggtgatgtgcacctgagatatcagctacacaggaggctgaggcaggaggatcccttgagcccaagaggctgaggctgcagtgagccatgtttgtgccactgcactccaatctgggtgacagagtgagaccctgtctaaaaaaaaaaaacactatgcaaaaattagccaagcttggtggtgtgcacctgtaatcccagctacttgggaggctgacgcaggagaatcgcttgaacctgggaggtggaggttgcaatgagccaagattgtgccattgcactccagcctgggcaacagcagagactccgtctcaaaaaaaaaaaaaaaaaaaaaaaaactaactaataatgcttgctcattataaaaaatttgaaaaatgcagcaaaataaaaaagaaaaagaaaattcacccacttctaagagacagcttctattaatgtttaattatatttcctgtcttttactgggcatatttgtatgtattctgaccatcctgtatatagaaatttgcatcctgaccatactctatatgcaaatttgcatctggcacatttttgcaaacaatttttattaacttggaatgaacagctgtatttccttcaactactcaaatatgacctgacctcactattgtacaccacctttttgctctggaaagtaaccaaagagatgatcctcacagtccttagggcagaataaattatgttttttcttttttttttcttttttcttttttttcactctgttgcccacgctggagtgcagtggcgcgatcttggctcactgcaacctctcactcccaggttcaagtgattcttctgcctcagtctccccagtagctgaggttataggcgtgtgccaccacacccgcctaatttttgtatttttagtagagaccgggtttcgccatgttgcccgggctgatctcaaagtcccggactcaggtgatccacctgcctcagcctcccgaaagtgctggaattgcaggtgtgagtcaccacacctggccagggcacaatacattttttgttttgttttattttttgttttttgagacgcagtatcgctctgttggccaggctggagtgcaatggtgtgatcttggctcactgcaacctccgcctcccaagttcaaacgatcctcctgcctcagccccgctagtagctgggattacaggcacgcaccactatgtctggctaatttttgtatttttagtagagacagggtttcgccatgttggccaggctggtcttgaattcctgatgtcaagtgatccacccaccgcggcctcccaaagtgctgggattacaagcgtgagccaccgcaactggctttttttttttttttttttttttttgagacagagtctcgctccgtcaccaggctggagtgcagtggcacaatctcggctcactgcaacctccaactcccaggtacaagtgatcctcctgcctcagtctcccgagtagctgggattacaggtgcccaccaccacgcccagctaatttttgtatttttagtagagacggggtttcaccatgttggccaggatggtcttgatctcttgaccttgtgatctgcccacctcggcctccctaagtcctgggattacaggcgtgagccaccgtgcctagcccagaataaattaaacattaaagcttagatttcatttctcagttcacttgtatttagaaagagctgtgggggcgaatctgtttcccttttcctcttccccctgcctgggagccatcctggatctttcaggccagtgctttcccagggatagtagcacaaaagtggaagccacctggatctctgactccgtgaagccttcacaccaattctgcattctttatgtttggtcaatttgtaggagagaaataaagttcgattttgcttaagccactattatcaatttcagctacttgtatttcttgtctaacaaacagtgctcatgaaacatgatccatttctcatattcctgaatctctttagaaacaccagtcttgaggctgggttcagtggaaggccaaggcaagagaatcacttgaggccaagagttcaagaccagcctgggcaatataacatctctacatacatgaaataaaaaaaatacgacgtgagtggatcatctggggtcaggagttcgaaaccagcctggtcaatgtggtgaaaccccgtctctaccaaaaatacaaaaattagctgggcatggtggcacacaccagtaatcccagctactcaggacgctgaagtgggagaattgcttgaacctgggaagtggaggttgcagtaagcggagattgcgccactgcactccagcctgggtgacagagtgagaccctgtctcaaaaaaaatacttaaataaataatttatggcgtcataaaaatccttgtaatgaaatcttttcctacttgctggagtacttccaggaagtaaattcctagaagtagaaataatggaacaacagatatgcgcattttcaggctttggatgcaggctgcccagttcttccgaaaggtcatcctcgtttgcagccagcaatgggagtggggtctcccatgtcgctgtgctctccttggctatagggaaccagatttctgatatctttgctgatttgacggcaaagaggagggtttcagtacttcaagttcagttattactggtggtaaacttggctttgatcaatttcagctatttgtatttcttttgtgatctgtcttttcctctcatttgcccatttctcttttggctgattggcttctcatattaaatttattaatgttttcattaccttaaggatgttaactatttttttcttttgtgatctgtcttttcctctcatttgcccatttctcttttggctgattggcttctcatattaaatttattaatgttttcattaccttaaggatgttaactatttttttcttttgtgatctgtcttttcctctcatttgcccatttctcttttggctgattgccttctcatattaaatttattaatgttttcattaccttaaggatgttaactatttttcttgttttcctttaaaaaaatttttttttaaagagacacagtctcaccctatcatccaggctggagtgcaatgacagatcacagcttgctgtaatctcctgggcacaagagatcttcctgccccagccccccgagtagctgggactacaagcatgcaccaccacacctggctaattttcgtattttttattagagacaggatttcaccatgttgcccaggctggtcttgaactcctgagctcaagggatcctcttgccttggcttcccaaaatgctggaataacaggtgtgagccaccacacccagcctcttcccacattttactctagtccatctggaatttattttcatttatcagtctccaaattaatatttgtacctcaaatggctaagacagaaatccaactgctgtgacattatgcttctgttctataatgcattcttgctcttctgctctgtctttggccagtcattctggtacattacccatcaagattgttcttacactgaaacacactttaaattatgtgagcttcatgatgttactatcttgtaaccaggctctatccacagcacctagagcctggcacatggcaggatctcaagaaatatctggcaaaagaatgaattactgaatgaataagtgggaaaataaatgaataaatacaatatgcagctgagcgtggtggctcacacctgtaatcccagcactttgggaggccaaggcaggaggattgctcagccagttctggccccactcaacagcccagctgagctcgaaaccaacagccagtgacattgccaaccatggacatcagccaccttggacatcagcctggttgaactttcacatgactccagctccctccaacatctaacttcaccacatgagtaacaccaagcaagaaccaccctgctgagcccttcctaaattcctgacccaaaaactcagagggaaactaaaataagccacttcacttggggataatttgttacgcagcaatagataactgaaacactgggtttgcaaactcaaccctcactctaaccctacagcatccagatgtttaatgtaaacagtgagttgggcctggtgcaggtgagcaggtgcggtgggagccctgaggcactggggaacctgtgctgcactgccctgagctgtatgtctccccagatttgttccttgccctcccctttcttcccccatcctaggctgctatttccagtcttccctccagctggggttgaatcaatgggaagctcaggtaggaggctggaggaccagaacaagcagccagggtcattccactccccaagggtcattctcctccttctcctggtagttatgcctcctctagagccccagctcctgccagccagacaatcccactgtgttcccagcttctactaggaaaccttatctctgggctccggtgacaccacctcctccctttgttcctccaacttacggtggaggcagcttccctctgctgctaatttccagtttcttcactgactcccactgggcccctcagctcctccttccctacttaaccatctccatctccaggtgttcatgtccccctgtgtttttgtcattgttgttgttgtttatttatttatttattacagacagtttcgttcagttacccaggttggagtgcagtggtgcaatcatagctcactgcagcttctaactgctaggttcaagtgatcctcctgcctcagccttctgagtagctgggactataggcacaggccaccacacccaggtatttctatttattttatttatttatttattcattttgtagagacaggatttcac[131 bp omitted]tgcgggacatgccatgcagagaatgaaaggtgggtgctgtgtgaacgtgggtacaaggaagttaggctttcactggggtggcacaatggcagctctgaggcaaaggcatcagagcaaaagagaaggaaaagagggagcctgccctgcaaagatctgggagaaccgtgctcccagaagaggaatggctatcacaaagacccaaggcaggaaagagctgggagtgcctgaggaacagggagaaggttgagcaaaaagagcagcaacatggggcaaaaagagcaggatcatggggagatgatacgaggatggagaagttgctgtggtcacaggagccatgggcaggagtttgtgcaaccagtttgtccattacccgatgcacacagcaaatcaagacagccagttgcagctgagaaagaggattagttgtagggtcaacaaataacaacatgggagagaagctcaaattcatctccctcaggaatctggagcaaggattttttttttttttttttttttttgagatggagtctcactctgtcgccaaggctggagtgcagtggcgccatctcagctcactgcaagctccgcttcctgggttcacgccattctcctgcctcagcctcccgagcagctgggaccacaggcgcctgccaccacgcccggctaatttttttgtatctttagtagagacggggtttcaccgtgttagccaggatggtctccatctcctgacattgtgatctgcccgtctcggcctcccaaagtgctgggatcacaggcgtgagccaccacgtggggcaaggatttttaaggatttgggggtgagacaaagtgtggatatcattgttggaagactgccgggtgaagtttagggacatggagaggaagaagcagtattctcatactactggcagtcctctgtgggggtcttcacattggttgctggaatttgggggtctgataaacaactcaagtgatcttttttaaaaaagccttaagattctaatgtcagagatcctgcctgtgggaacaatggagatgcaagtcaattaaatgatcttatgaccctaatgtcagacatcctatctataggccaggcacagtggctcacccctgtaatcccagcactttgggaggccgaggcaggtggatcacctgaggtcaggagtttgagaccagcctggacaacatggtgaaaccccgtctctactaaaaatacaaaaattagctgggcgtggtggcagatgcctgtaatgtcagctactcagaaggctgaggcaggagaatcgcttgaacccgggaacgagaggttgtagtgagctgacatcatgccactgcgctccagcctaggcaacaagagcaaaactctgtcagaaagaaaggagaggagaggagaggagaggagaggagaggagaggagaggagaggagaggaaaggaagagaaagaaagaaatcctatctataggaacaatgggggtctagtaccacctgacttttagcaacaaggaagtggac[139 bp omitted]gtgaaaccccgtctctactaaaaatacaaaaattagccaggcgtggtggtgggcacctgtaatcccagctactcgggaggctgaggcaggaggatcacttgtacctgggagttggaggttgcagtaagcggagattgcactactgcacttcagcctgggtgacagagtgagactcaaaaaaaaaaaaaaagacagacaggcatggtcggcttgttaacatgcagactgctgggtcccccagagattctggttcagtagatctagaacaacagagaatttgaatttctgacaaattgtcatgtgatgctaatgctgctggcagaggtcacactttgaaaaccactggtctagaaaaacaccttttttttttttgagacagggtcttgttgtctcacccacgctgcagtgcagtggtgcagtcacggctcactgtagcctcaatctcccgggctcaagtgatcatcctgcttcacccttctgagtagctgggactacagggtgcaccatcccacctggctaattttttaaagattttttttttaatatgtggggtctcactaagttgcccaggctggtgtcaaattcccagactcaagcgatcctcctgtctgagactcccaaagtgctaggatcacagctgtgagccactgtgtccagccacaagtgaaagtaagttaataaaatatgtcacttgaatttaattattttgctaataattaatagatatgctgggcatggtggctcacatctgtaatccctgcactttgggatgccgagccgggtggatcacctgaggctgggagtttgagaccagcctgaccaacatggagaaacctcgtctctactaaaaatacagaaaattagccgggcgtggtggcacatgcctgtaatcccagctattcgggaggctgaggcagaagaatcgcttgaacccaggaggcggaggttgcggtgagccgagattgtgccattgcactccagcctgggcaacaagagtgaaactctgtctcaaaataataataataacaataataaatagataatatttatataaacatatccaaaatactatttcaacatgttatcaatattttataaatgactgagctacttttttttttttctttttatttgagaccgagtttctctgtagcccaggctggagtgcagtggcatgatctcagctcactgcaacctctgcctcccgggttcaagttattctcctgcctcagcctcctgagtagctgggattacaggtacatgccatcacacccagctaatttttgtattttcagtagagtcagggtttcaccatgttggccaggctagtctcgaactcctgacctcaaacgatccacccgctttggcctcccaaagtgctaggatcacaggcatgagccgccccacccggcttacattcttttttcctattaagtcttcgaaatccctgtgtatattttatatttgcaacacatcacaattaggacttgtcttcaatagccacatgtgtgactagtggctaccatactggacagcacaggacaggcctggaatggtggccactgttgcggggatagtgagttgaaggtggagacttgcctcttgaatttagcaacgaggatgagctttggcaataaaaagtttcatttttgtgaaatggagagagagagagtatatgaacacttccttcctgaagtttgggtgtggttttaacaccaatagagagatctggctaacaaaactcaaaaccaacaccagatattagcagcacaaaaaaagacaaccacatattatgtcccttctgataggagatcttaatattatccctgaagtatacttaaccccaaactgaatgtgtatctgactcagcctctagatctaccagtttgcaagacatacagaggatggcagaacatattaaaggacaccaagaggggaaaccagtcaaatcagactgagaagagattatttataggtggatagtgtcaaaaagaaaggaaaaaattaaaatttgtaaaaaacaaaaaaaaaaatcacactttgggaggccgaggcaggaggatcgcttgagctgaagagtttgagaccagcctgggcaacacagtgagaccctgtctctattaaaaaaaaaaaaagtataaaattttggccaggtgcggtggctcacacctgtaatcctagcactttgggaggtcaaggccagagaatcacctgaggtcaggagttcgagaccagcctggccaacatggtgaaaccctggtgcagtggcccatgcctgtaatcccagctactcaggaggctgaggcaggggaatcgcttgaacctgggaggtggaggttgcagtgagttgagatcgtgctattgcactccagcctgggtgacaaaagagagattccatcttaaaaaaaaaaaaaagtataaaattaaaaaattagactgagatgaatgagagggagagggaacagttataaaatagaagacttaaagaggtaacaaacaaatacaatgtacaatgcaggcaccctggtcggattctaatttgaacaagccaacagtttaaagacatttctatgacatttagggaaatttggagacaggatgaatgttaagacactactaaggatttgttggttttttaggtgcgataaaaatgttatagtaatgtttttttaagaaccttatattttagagatacataatggatgaaatcatgtgatgtctgggatttgctttaaactaactttgggggaggtggaataaataaaacaagattggccatatgttgataattgttgaagctgggtgatgggtacttagaggatcattacattattctatttctgtgtacgactgaacattaataaggctttaaaagggggactgctgtgaaaaagagaaaaaagtagggaaattgtgtgttttttccccccaggatcgaagcgcctttaacaggctccacagctgacaaggacgttgggatgcaagagagtgagaaggcgccagggtggctgcagggcacattcaatagtcggtctagctcttgctcccgcggctgccttctctgcagctctggaggctgcagcttctggtcctggaccgggacttaggtccacacccacgtgctgacgtcgggcaggctcagcggcctcccgcgcctgcgcagcaccgcccttttcgggcgcggcgcccagtccctacaccccacaatcccccgcgccgttccggaggcgcgctaggagtgggtgtggcctctgcctccacattggaacaaggtgaggcagagggtgtcgcgtggtcttctgggaaatgtagttcgtctgccaggccggaaccaccgctcaaccggctcgcgagactatgcaccccacaatgcgccgcgcgcgcagcggctaagcgatgcgttgctgcctccacgtggtggctgagtgatcatgctccggtttgggaatggggcccagaagggtagggttaggggcggggacggtgctggggatgctgagggtcgccctggaaacctctgggaagattttccagagggtaagtcccctgaacctggcccacgaaagggtagtagtaatgaagaaattggaggtggggcccgctatgaggaccgaatgacagagcagcacctgttggctgcatatgataatcaggctactgttacacctaagactcacacagtaggcacttcctaggccacttaccgctccctgcgcttcaggtatcttagcccattcaatcctcccagccaccattcgagatattatcagccctcctttctaggagtgaagctgaagcccagaaacgcgaatcacttgctcaaagttattcaacatgtcagtggcagagctgggatttgaactaggctgtcgggctaccaagtctgggctcttcttcataggaatatctcatcaccctattcagttatcctaaaattgtaattagcacatgaatcaagtcaagatggtcattaacatgtgaatctctttgagtcgctgattaccagcgcttgttcctgcccaaatttgtgacttagacctgcttcaggacaaagttgacaatcaacatagatttatagttagcacatgaatcagcacaggtttctgttcacagggatcagatttctgattagcacttgaatcagcagtggtttgtgtcaacagctggagtctttaggttcctgatttgcacagggatctccatccagggattattttcttgcctaaataggcctgttcctttatgtccaggtgaccttctcttcaaatgttgtcccagctgggtgcagtggctcacgcctgtaatcccaacactttgggaggctgaggcgggaagattgcttgggtctgggagtttgagaccaacctgggcaacatagcgagaccccgtgtctccatgaaaaataaaacaattagcctggcatggtggcatgctcctgtagtcccagctacttgagaggctgaggtgggaggatcccttcagcccaggagtttgaggctgcagggagctatgatcatgccactgcatggcagcctcagcgacaaagcaagaccatttctcttaaagaaaaaaaaaaaagggcgggcacagtggttcatgcctgtaatcccagcactgtaatcccaggttgaggtgggcggatcaactgaggtcaggagttcgagaccagtctggccaaca[138 bp omitted]tggtgaaaccccatctctactaaaaatacaaaaattagcagggcatggtggcacgtgcctgtaatcccagctactcgggaggctgaggcagaagaatcgcttgaatccgggtggcggaggttgtagtgagccaagatcatgccactgcactccagcctgggtgacagagcgagactccgtctcaaaataaaaatcagccaagcgtggtggtgcatgcctgtaatcccagctactcaggaggctgaggcaggagaatagcttgaacccaagaggtggaggttgcagtgagccgagatcatgccactgcactccagcctgggcgacagagcaggactctgtctttaaaaaaaaaagagatgggggctgggcgcagtggctcacacctgtaatcccagcactttgggaggccgaggtgggggtatcacctgaggtcaggagttcaagaccagccttgccaacatggtgaaaccccatctctactaaaaatacaaaaattagccgggcatggtggcacatgcctgtaatcccagctactcgggaggctgaggcagaagaatcgcttgaatccgggcggcggaggttgtagtgagcaaagatcacgccactgcactccagcctgggtgacagagtgagactccgtctcaaaataaaaatcagccaagcgtggtggtgcatgcctgtaatcccagctactcgggaggctgaggcaggagaatagcttgaacccaggaggtggagattgcagtgagccgagatcatgccactgcactccagcctgggcgacagagcaggactctgtcttaaaaaaaaagagatgggggctgggcgcagtggctcacacctgtaatcccagcactttgggaggccgaggtggggggtatcacctgaggtcaggagttcaagaccagccttgccaacatggcgaaaccccatctctactaaaaatacaaaaattagctaggcatggtggtaggtgcctgttatcccagctacttgggaggctgaggcaggagaatcacttgaaccaaggaggcagaggttgcagtgagccaagattatgccactgcactacaacctgggcaacaaagtaagactctgtctaaaaaaataaataaataaatagg[140 bp omitted]gcatggtggcagacgcctctagtcccagctactcgggaggctgaggcaggagaatggcgtgaacccgggaggtggagcttgcggtgagccaagatcacaccactgcactccagcctgggcaacagagctagactctgtctcaaaaataaataaataaataaaataataataaaatggggttatttgttttttgcttgttgcattgtttaagtcccttatagactgaattcctctttatgtctctaaatacatttgtctctttggtacacatctgcggtgctacatgccctcaacccaccaggttttagcatagctgttgtggtagacagttccgtgtgcagtgcagatagccctggttcagcccagctgttctcaaaatgtggtccctgaccaggtgtagtggctcacacctgtaatcacaacactttgggaggcctgggagggaggattgcctgaggccaagagttcaagaccagcctgggcagcatattgagaccctgtctctacaagaaattttaaaaattagctggatatggcgatgcatgcctgtagtctcagttactctggagcctgaggtgggaggattgcttgagcccaggaatttgaggttgcagtcaattatgattgcaccaatgtactgggtgacaaagcaagaccctgtctcaaaaaaaaaagtatggtctttgaaaagtcacattagcatcacctgggtactcgttaaaaatgcaaatgtttgggtcccacctcagacccactgaaccagaaactctgaggttgggacctggagatctatggtgcccccgggtgatcctggtgggctgcactgcaaggacacctggcctggctcctgcaaggcaaggcatccctctctgcttttctttctttctttctttcttttaaagacagagtctcactctgtcacccaggctggagtgcaatggctggatctcagatcactacaatctccacctcccgggttcaagcaattctcttgcctcagcctcccgagtagctgggattacgggcgtccgccaccacacccggctaatttttgtatttttagtagagacggggtttctccatgttggccaggctggtctccaacgcctgatctcaaaagatccgcccgccttggcctcccaacgagccgggattacaggcgtgagccaccgcccccggctgtcagtgtgtcttgaggtctttccctaatcccagatggcacaagttttccctcttgcaggcagagaaaggagccttgggaaggagcccctctggcctgaaagatcaagcctattgctgggcatggccaggtaaggaaactccaaccgtggaaaggacattccagggaggtggtgctgagataaggggggcagaaagagacaggtttggggggccagtggctctggaatgaagcgctacactcaaggctaggaatagttactgaatgcacatacacacataccattctcacagcccaggtgctgcgtcttagagcgtgtgagtgtgtatgtgtgtgtctgtgtgtgcgcgcgcacgcacgtctctatctctgtttctgtctttctctgacttgtccttatctcttgtctctccatcactctctgtgtctcgctgtctctgtgcatttccatgtctcgaatatgtgtgtgtttcaatctgtctctctgcctctttccattttctcctctctatccatcaatctaagcctgcccatctttttgtctgcctttctgtatctccgttcttctctgtctctctgtctcagtctctctgtatccagggattctctttcccagcagcgccagtgcgactccatgggaggtggggccggggcgcgtctttgagagaaggggcgggtgcctacgcctttaagcgcgggtgcgcgcggagcctgcgcctttaagcgccggtgcgcgcgctgccctgggttgccggcgaggaggccgcgggagcgcctggacccggcccgcccagcccggcccccgcccggcccccgcctcggccccggcgggggaggggtctctgagcgcggcccctcccccctgcgcccccgcctgcgctgcggtgcccccatcccgcgtgtcccagtctgtctgaccgtccctccgctcccaggcctcgccccacccggccctggggctgcccggtcgcccccctccccaccgcagccggtcccctccctcccagtcagcctccgccgcagcccaggaagccagccgggacgccgccgccccggaccccgcgccctaacctccacctcgggggcctgcacccccagattgaatcgggaattccggaaacccgagcctggaaccctgatctgggaccagcaccccgagatccggccgtggaaccccaagatctggagcctgaaccccagtatatggggctggaatctcaacatcggtcactgggacctcaatatttggagccggaaccccacaatttggaacacagaccccaatatttggagcagaaccccaagatttgacatctaaaacctcaagcctggagctgaactctgaattctgggcctgggaccttgaaatctgggactggatttccagtactgtaccctggaacccactcttggggacctgaaccctgggattcaggcctcaaattccaagatctggactgtgggattccaaggggcctgaacccgagtttgggcctgaagtccttgctgcagacctgagtgcttaaatctggggcttgagacctcccaatcttgactcagcaccccaatatctgaatgcagaaccccgggatcggatctcagactctaaaccccaccgtttggctgcttagcatcccaagactggacctgggagaccctgaccctgaacaacccaaactggacccgtaaaactggaccctagaggcccaatatttaggggtctggaaccccgagtattaaggtctggagactccgttgccacagatttgagccgagtcaggacacagtccctctacagaagccttggggacaggaaaagcatgaccagatgctccctccagagccctgacctctgactcccctggagctaggactctgctccctggggctgcttctagctcaggtaaggctgctgaaacctcaaggtggggacgggctgggaggagcattgtggctgcgggttacggtaccaggtaccctttgacactcttggggtttctccagaaaaaaagacattcccccatgggtctgccttcagctcctgctctgctccaaacactctctggacactggccatccttgcccctctctgaccttccctgcctcagttgatgggacctccaggtctctgacccctgcaacccttacagcctttcgctgtctatccggtccgaccgtctccgccacctctcttgtccaccactcctctctctgggctcctttctccacctgtcctctcaatggccatctctgttccctttttctctctctgatcatctttgtgacacccctgtccacaggtcctctctccagtcgcctctgcctgctgcttctcagtgaccatcgctgacatctgtgtccactgtgcctctctctaatcatcattcaccagctctcttgctccttctccacccctgaatctaagcctaggtctgtgaccgtccccatccatctttgacattgctgtccaccactcttctctccagcagcctctgtccatctctcctctctagcttcctctggccacctttccctttctctggccatctctcccactgctcttgccctcctcccacccctgaccctaactcccagtctgcaactgtctgaccatctctggccacctctcctctctctctcactcactgatgccctctgatcatctctggccacctcttctctctctctcactcattgatgccctcttgatcatctctggccacctcttctctctttctcactcactgatgccctcttgatcatctctgcccacctcttttctctcgctcgctgatgccctctgatcatctctggccacctcttctctctctctcactcactgatgccctctgataatctctggccacctctcctctctcacttgctgatgccctctgatcatctcgaacatctctgctgcctttcctctctccgatgacctctccccgcaccatcctcctgagcagctgtcctgggctcccactgactctgccatgtctgtccttttcctcctctctgaccaccttgctggctttgggccgtttctgaccacgtgtctctgacatggtcatctcccccagatctgagcccaacccatgccctcccttctctttgtccactgctcatcttcctgaccatctgtaaccccttctcttctctggtcatatctgaccacttctgatcattgttgccaccctggctgccccgtctccccatggccagcttttaccatctctgaccacgtctaaagccctctggttttcctgccactcacccagaccagctgtcatttctctgaccatttctttacttttttcttttggagagacagagtcacgctctgttgcccaggctggagtgtggtggcgcaatcatagctcactgcagcctcaaattcttgggctcaaattgatcctcccacctcagtgtcccatgtagctaggaccacaggtgggcgccaccatgcctagctaatttttaaaaatttttgtataatagatacacggtctcactttgttgcccaggctggtcttgaactcctggcctcaagccatcctcctgcctcagcctccccaaatgctgggattacatgtgtgagccaccgcgcctggccttcctctggcttttggtcacatctgacggtctttgaccagcccttctgccctcagcccactgtgaccttctctcctggtctcagaccacccccagcccctgcagaacccctcttctgccctcacgcctcccctcttctccgcaggacacccctgcccgcgatggccatcctcccgttgctcctgtgcctgctgccgctggcccctgcctcatccccaccccagtcagccacacccagcccatgtccccgccgctgccgctgccagacacagtcgctgcccctaagcgtgctgtgcccaggggcaggcctcctgttcgtgccaccctcgctggaccgccgggcagccgagctgcggctggcagacaacttcatcgcctccgtgcgccgccgcgacctggccaacatgacaggcctgctgcatctgagcctgtcgcggaacaccatccgccacgtggctgccggcgccttcgccgacctgcgggccctgcgtgccctgcacctggatggcaaccggctgacctcactgggcgagggccagctgcgcggcctggtcaacttgcgccacctcatcctcagcaacaaccagctggcagcgctggcggccggcgccctggatgattgtgccgagacactggaggacctcgacctctcctacaacaacctcgagcagctgccctgggaggccctgggccgcctgggcaacgtcaacacgttgggcctcgaccacaacctgctggcttctgtgcccgccggcgctttttcccgcctgcacaagctggcccggctggacatgacctccaaccgcctgaccacaatcccacccgacccactcttctcccgcctgcccctgctcgccaggccccggggctcgcccgcctctgccctggtgctggcctttggcgggaaccccctgcactgcaactgcgagctggtgtggctgcgtcgcctggcgcgggaggacgacctcgaggcctgcgcgtccccacctgctctgggcggccgctacttctgggcggtgggcgaggaggagtttgtctgcgagccgcccgtggtgactcaccgctcaccacctctggctgtgcccgcaggtcggccggctgccctgcgctgccgggcagtgggggacccagagccccgtgtgcgttgggtgtcaccccagggccggctgctaggcaactcaagccgtgcccgcgccttccccaatgggacgctggagctgctggtcaccgagccgggtgatggtggcatcttcacctgcattgcggccaatgcagctggcgaggccacagctgctgtggagctgactgtgggtcccccaccacctcctcagctagccaacagcaccagctgtgaccccccgcgggacggggatcctgatgctctcaccccaccctccgctgcctctgcttctgccaaggtggccgacactgggccccctaccgaccgtggcgtccaggtgactgagcacggggccacagctgctcttgtccagtggccggatcagcggcctatcccgggcatccgcatgtaccagatccagtacaacagctcggctgatgacatcctcgtctacaggtgcagggtccaggcactggggtagcttgggtgggggagtgaggcaaggggagggttgagggtacacctactaataccctacaccgaagcacaactgataagtgatgctggaaggttccaaaagaaatcagagagcaaaagtaaaagaaatcaggcagcaaggataacaagactctggcagaaagggtcaatgaaatctgacagcagtgataaaaagaagtcagacaagaaggacgaagtaaatgagacagcaaatgttaaaatatatcaggctacagggctaaaaaagatcaagcaataaggataaacgaaatcaggctgcatgagtaaaaagaaattaggcagcaagaataaatagtagtagcaaacataaaaaggaaaccaggcagcgggaggagaaagtaatcagggcagaagaataaaatgttaatgggcaagggtgggtggggaagataaggggataaaaataaatttaagttgtaaagataaagagagaaacaccaggttttccagatgacaggactagatactagctgggctgcaggaagaaaaggagatcaaacaggaaagcacagggagcccagaaacaatgaaataagcagctctgttagaaaaagaaatcagaccagaggttagaaggaaattgcagggaggaggttcgatagagactgggcttcggtgtgtgtggtgtgaactattccatgtttcaagttctaatatagtgacatccagatttttttttttttgagacagggtctcactttgtcgcccaggctggagtgcagtggtgcaatctcggctcactacaacctccacttcccgggttcaagcgattcttgtgcctcagcctctcgagtagctgggattacagacgtgcaccagcacgcccagctaatgtttgcattttatttttagtggagacggggttttgc[135 bp omitted]agtctcactctgttgcccaggctggagtgcagtggcacaatcttgactcactgcaagctccgcctcccaggttcatgccattctcctgcctcagcctcccgagtagctgggactacaggcgcccgtcaccatgcccggctaattttttgtatttctagtagagatggggtttcaccatgttagccaggatggtctcgatctcctgacatcgtgatccacccgcctcggcctcccaaagtgctaggattacaggcctgagccaccgcgcccgacagattttttattttctaaatcaaatcaaacctagttcaagttccttttgccaggtaaacagaaatatccagtttgccacacttgtgggggattctcttctctctcctgttgttgcaaacacagaacctggggtttacacactccaagaggtggctcagtccaacttgttcccccaagctggagagcactcagcacatctgcagtgaccgcatgtggtcagcagtggtggctgctgacctaggtgctgttgacacctcttaccaaagtccaaccttgcatggatggactgcggctgtgggtgagtccctgtcctcacggccaggctgggccaagggtgcagccccaaggctgactgtaaagactggacctccccagggttgaggactgttccttggggacctagtagtacctggatgtcctttccctcccttggggccaacacctcaagaaaaggccacttgatttccatttcagtcctggcaacccactgagctcattctactccctttctcagacatgactcggaagattgcacggaagtcctgcccctgaaaatcacacaagtcggccaggcgcggtggcttaacccctataatcccagcactttgggaggccgaggcaggtggatcaccaggtcaggagtttgagaccatcctggctaacacggtgaaacctcgtctctactaaaaatacaaaaaattagctgagtgtggtggcacgcgcctgtagtcccagctactcaggaggctgaggcaggagaattgcttgaacctgggaggcggaggttgcagtgagccgaggctgtgccactgcactccagcctgggtgacagagtgagactccgtctcaaaaaaaaaaaaaaaaagtcacacaagtcctggccaccttgccaggtggggaatgggatgaatgctgtcctagacagtcaccctgccccaggcggccacggagttccctgtacctctctcattagaatagcctaggaataaaacaggtgataagtcaactctccaacagggtgcccaactacaaaagaaactatagtgaaattgggtggtaaggattaaaaggaaacaagaaagaaaaagataaatagaaaccagccaacagagataaaagagaagcaggtgacagagccggaaagaaataaggcaacagggagaaaaagaaagcagtagtgacggaggcacattagtttaatgaaaagggaatcagacgacaggactcattggaaaacaggctatcaatacagtcatcataataaggcaatagggctagggggacatttattggcaggttacaaggaaatcgggcaacaggggtacagggagatcaggtggtttgattggagagaatcctagctgtacactagaggaaaatcaggcagctggaaaagggaaatttggcataggctgcaggaaataggggaaccagagggaaattggcaagcgtctggaggagactgggaggtaaaatgtgggggaaattggatgggggtggctagaagacaaaaggattaaattagatggaaattggacagggttagagcagaattgggtggtgaactggagagatgactggcagtgggaccagagtgaaatcaggcagaggattggggcaaaattgggcagggaggctagagcggagctgggctgcaggctggagggaaattgagtgggcagtgcaaaagggaaattgggcagttgggtataaaatgaaaccggcaaggtgtggtggctcacgcctgtaatcccaacacttaaggaggccaaggcaggaggctggactgccttgaggccaggagtttgagaccagcctgggcaatatagcaagagcctgtctctacaaaaaatttaaaaattagctgggcatggtagtgcacacctgtagttcctgctactcaggaggctgaggccggaggatggcttgagtccaggagtcagaggctgcagtgagctgtgatcatgccactgcactccagcttgggcaacagagcaagaccctgtctataagaaaacagaaagaaagaaagaaaagaaacaggatggattggaagaactcacgtggtgagctgttagagaaattgggtggtgggactagagtgaaaatgggcagcaggctatgaggacgtgtgagagggtgggctagagtgaaattggccaacagactggaggggtatcagtcaggtggctgaatgggatgtcagaccaaagggaattgggatgttggtgagagggagctcattgggtagaatgaaatgaaggagtggactggtgggaagtctagccccgcagggagtttggtgggggaagcacaggttgggggctgggcagcctgagacctgacccccacctgcctgccctgcaggatgatcccggcggagagccgctcgttcctgctgacggacctggcgtcaggccggacctacgatctgtgcgtgctcgccgtgtatgaggacagcgccacggggctcacggccacgcggcctgtgggctgcgcccgcttctccaccgaacctgcgctgcggccatgcggggcgccgcacgctcccttcctgggcggcacgatgatcatcgcgctgggcggcgtcatcgtagcctcggtactggtcttcatcttcgtgctgctaatgcgctacaaggtgcacggcggccagccccccggcaaggccaagattcccgcgcctgttagcagcgtttgctcccagaccaacggcgccctgggccccacgcccacgcccgccccgcccgccccggagcccgcggcgctcagggcccacaccgtggtccagctggactgcgagccctgggggcccggccacgaacctgtgggaccctagccaggcgcccccccctctaagggtcctctggccccacggacagcaggacccggacaccctgtgggacctggcctcaaactcaccaaatcgctcatggtttttaaaactctgatggggagggtgtcggggacaccggggcaaaacaagaaagtcctatttttccaagcttgggcgaagacccttgccctcgtctctgtctatgggggttgggggacggagcaggggtctggagctggggaatgcctcctttggggagacaccccctccccgcccagttcagtctgaggaccccggaggaggctgaggatggcgatccattcagacaatagatgttccctgcgtgtcggctctgagcatgccctgggttgggggatgctgtggtgatccagatagccctgagccctgcccgcaggggcctaaagtcaaatgggagacagacacatccccagacagtgatagcacagagtgaccagggatgtggggatgagggaagcctgggggattgtgacagtccagaagaggtacccttgctcagccccaggtgtggtcagggagggcttcctggaggaggacacatgtgatctgagaatgacatatgaaggagataactgggcaaagagcagaaggaaagctctttcaggcagagggcacagcacaagcaaggtggtggtgtgccctgggcactgggggtgctatggtagaggtgaggcaggagggttgagcagggtctaggacctccaggctgaggagctcagactctggcctgatgataccagggagccatggagggttgtatgcaagggaggaatggggtcagtttggggcttcaggaagatccttctagtgctatgagtagggtggacccaaggggaagactgaagctgggagccccaggggaagctggggcagggacctgggtgggtgaggacgaagttggaccagctgggctagggaacaagaaaagggagtgggttgacagagacactcgggaaactgtgggaagctgaggcggtgggttatggagctgcggggccatggggtggggcaggaagatggtggggactgccctcatataggaccagggaggaggagcaggtttgggaaagatgatatggccagtggggaacttggtaggtgtagggggccctgaggatgtccaggatgtggcattcaggagggtgcaggacccctggtctgaggctgaagctggaaatagaaatgagggctttgtcagcagagatgggaactgacgctgctggggttaagacggcttcttgtgggggatgattccaagtccccactatgggacattttttcttttttcttttttttttttacagatggggtctcactatattgcccaggctgatcccaaactggcctcaagtgatcctcccgtctcagcctcctgaattgctgggattacaggcatgagccactgcccctggctagggactttccatatttaagggtgacgcaaagaaaaacctaaccaagactaaacaggaccagcaggcagagggacagggggaagaagaccaagcaattcagacccaagaaactcttgtgttcaatgatataaataaaggctgcggtgaccccccagagagcagtgttagggggtcagttggggcagatggcagattcagctgatttgagaggagggggtaagaaaatgtagctagagggtgcagcccctgtcaacctgtgggcctggagtcccatgtctttgcagggtgggtccttactctgtcttgggcagccctaggccccatgagacaccaagcctggaggtttgcagaaccaaaccccggtctaggagatgttgagcctccttggagatccaggaacggggttggcagtaagaggaatagcaccccctgaactcagggcttcactaatgatgtccccagaggcaggagagtggagggaagctgggtcctgtcacctggagggacactggtgtgagggcatggtaaagagagcccaagactgaactggcccttttcatgacctggggcacatgattgtgacctcgtgggatgacatatcctagattctgccacagcttttctggggggtctaggccttgaacatgttatgccatgagtcatgggaccagcctgagtcctgggggacctcgtctgaccacaccctactccccaagtccccagcagtatcatgagatccttcttgttgtttgttagccttggacagctgaagtcaggtgacgtcatcaagaagagtgagggcatgagtcctggggaaaggggcctaggagcaggggcatagtgtttcgagactgtggtcccagctactcgagaggctaaggtgggaggattgcttgagcccaggagttcgaggctgcagtgagctaggattgcgccactgcactgagcccaggagttcgaggctgcagtgagctaggattgcgccactgcactccagcctgggccacagaacgacaccctgtctccaaaaaaacagaaaaggagcctaggaagtgaggatgctgggggcctagtgctggctacaattaccagttgctcccatgagggggagccagagggcactgttcgtgtgtgtgtgtgtgtgtgtgtgtgtgtgtgtgtgtgtgtgtcgaagtctcttgtcgcctaggctggagtgcaatggcgcgatctccgctcactgcaacccccgcctcctgggttgaagcgattctcctgcct[450 bp omitted]ccacacccagctaatttttgtatttttgtagagatgggggtctcactgtgttcccatactggtcttgagctcctgacctcaagtggtcctcccaccttggcctcccacagtgctgggattacagatctgaccgtagatgttatataatcacaccagcaagtgtaagcatctgcagtgaccaaggggcgccatgcaggagacacatacagaagtgcgcgaccctgtaaccaggggccctgacccaacaagagagattgaggaaggcttcctggaggaggggaggcctggcggagacctgaaggatgcgcaggttggagttaaccatgaaaggggtgggaagggtattccgtgcaaatggaagagcctgtgctgagggaagcatgagtgaaagagctgaggccagggggctgaagtaggggagggaagggaagagagtgaccttgggttgaggctggaaagcaggaagggagccgatgacgcaggaccccgtaggctgctgggaggagtgtggattgtcctctaagtggcatgagaagccattgaagggttttttggttttttttttttttgagacggagtctcgctgtcgcccaggctagagtgcagtggcacaatcttggctcactgcaacctccgctacccgggttcaagtgattcttctgcctcagcttcccgagtagctgagattacaggtgccctgccacgacgcccagctaatttttgtatttttagtagagacttcttcaccatgttggccaggctggtctcgaactcctgacctcatgatctacctgcctcggcctcttaaagtgttgggattacaggcggcatgagccaccccgcctggcccattgaagggttttgaggtctaatgagagtagcagtccctgatctcaaggaagctctgtggggaggaggatactgcaatagtccaagcagaagggtgatccggaccaagttggggcctgaagtggttgaagagagatttgagacgaccttactagaggcctctgccccccacccagcagacagtgtgccctactgtacagctacccagttctgcagcaagattgcagagatgggaagaagagttgtaagacactgggctctgatatccacagctccaccccttagatgggggagggacttctgtgtagcatgggaatgacggaccttttccaggctcaagtagcaggcagacagtggatggaggctgagaggcagtgggtggtcagggggaatgtggacacaggaaatgcagggctggaagggggacacacacttggtagtagcttattacaaatatggaagcaggaaggatgggaggagggcagactggtccctctagcatgggtcccccatgttcccccacagcatgcctggaccacccccacccgcctgcagaaacacacaatcacatgtgtctaggatttaaagttaaaattttgcttgtcagctaggcacagtggctcatgcctgtaatcccagtgctttgagaggccaccctcagggaggattgcttgagcccaggagttcaagaccagcctgttttcaactccgtggaccctgtgaggcacacttcactctccccagccctctggataaaacagtagttccttaggaactttaacttcccccaaaatgctgtggcctcccaggcaacatagccataccccatctctacaaataataataataattagcttgtccaactgcctagctaagtccatcaatttcctgagctcagggagtacaactacttctactgtcaattcctcatcaattcctcatctgcttttggccccacacattttttagaccaaagctccggctgctggagcattatcttgaagtgactgtagacccaataccaggattctgccctgtctgtgtactgccagatccaacccatgtgtcttggggtggctaaatctgacaaaggccctgagtgtctggggacacctgtgatctcctgcaaggctgaggctaatgccacgcttttgcagctctttgcatgggcacatatgtgagagaatcagataaaaggtgttcccaaaaaggatgtttgtgttcagggtggaacctgacgcctgcctcctgcctttgggtcctccctgatggctgtgccctctcatacctcgcaaaagcaaagataggtatcagtgctgcctgtcgtcctgacctgtgcggagtgacgttgggaacattgtggtgaccaacacagccctagcccttgccctcagagttccagttcaaggctgggagcagtggctcatgcctgtaatcccaacactttgggaggccgaggcaggtgggtcacttgaggtcaggagttcgcaaccagcctggccgacatggtgaaaccccaactctactaaaaatacaaaaattatccgggtgtgatggcaggcacctataatcccagctacctgggaggctgaggcaggagaatcacttgaacccgggaggcagaggttgcagtgagccaagattgggccactgtagtctagcctgggcaacagagcgagactccgtcccaaaacaaaccaacaaaaaagagttctatttccagtggaggaaatagataatcacaaaacaatggcatcccagagtggtcggggatggggaaagaacaggcaagaatgatcagggcttttgcagaagcccaggggactcccagagccagagggttctacacttgatcttagccaaaaggccaagaagcaatctgaagtttctaactgggcctgggatgggaggtggggagacagtccaagatttcctgaggcagggccagctttatggcagtgtgactgtggggttgcaccatgccccaaacttagaagtaccctatgcttgctttaatgccctagtgtcactatcttgaaattaataatttttgaacaagggccccacattttgattttgcactgcgccctgcaaattatgtagccagtcctgcccggaggagcgaacacttgagggatttacagagagagccgaggcagagagggtcttcccaggagagagagcattgggtacaaaagccaagagagggccaggcgcagtggctcatgcctgtaatcccagcactttgggaggctgaagcgggcgaatcacctgaggtcaggagttcaaaaccagcctggcaaacatggcgaaaacccgtctctactaaaaatacaaagaattacctggacgtggtgtcaggaacctgtaatcccagctacttgggaggctgaggcaggagaatcgcttgaacttggaaggcagaggttgcagtgagcccagatcctgccaccgcacactagcctgggtgacagagtgagattccgtctcaaaaaaaaaaaaaaagaaaaaagagaggactgcacactcaaagaatgagccagagttcagtgtggctggcgcaccatgggagaagggcgcactgtggggccatggagggtggagggtgataaggtggagggacagggtcaggtttgcactttagaaaaatccatctggcagctgggcgcagtaactcacacctgtaatcccagcactttgggaggccaagacgggcggatcacctgaggtcgggagttcgagaccagcctgaccaacatggagaaaccctgtctctactaaaaacacaaaattagctgggcgtggtggcacatacctgtaatcccagctactcgggaggctgaggcaggagaatcgcttgaacccaggaggcggaggttgcggtgagccaagattgcaccattgcactccaacctgggcaacaagaatgaaactccatctcaaaaaaaaaaaaaaaaagaaagaaagaaagatccatctagctaccatggggagggtggatgggggcacaaggccagggagaagatgggggactcagctgcctgtggaaggagctgggagtgtgggtgattctgaggaggagaggccagcatgggcacgtttaccagaaccttgggtaatagacatcccagtgcaggagacgagctgggagaccccaaaaccacgggatgaacccagagcctcattttcacttgcaaatgtttaccgtgggtggcgggggatgcagaagggtaggttacagaatgtcactcactggtaagtacttgaaaatctttttatatgaaaactcgcatggatagactgatggaggtgaatgcaaaattggcaagaatttcgagtataaaatgtgagatttcaaaggactttcttctggatatgttctggcttcaactccatagacccccggggtgcacttcactctccccagccctctgggtaaaacagcagttccttgggaacttcctcttcagcttcccctaaatgctgtggcctcggggagctgggaatgagccccttcctgcctctgtactcacattcagggacatcgacccctaacacctgtttttcttctctgttggcaaccttcatatttcttttcttttctttctttttttttttttttttttttgagatgaagtcttgctgtgttgtccaggctggattgcaatggcgagatctcggctcaccacaacctccgcctccctggttcaagtgattctcatgcctcagcctcccgagtaggtgggactgcagacgtgtgccaccaagcctggctaatttttgtatttttagtagagacggggtttcaccatgctggccaggctggtctcaaactcctgaccttgtgatcctcccgcctcagcctcccaaagtgttgcaattacaggcctgagccacctcaccaggctacaacctccatatttccatcctcaaccccagcatctctcctaagtccagacctggcttacctcagtttcccggacccctcttcctggacatcccctggggcccctcacacccactggatcccacacccacctcggcttcttctcggacctatgcctccttctaggtcctgtctgggagagcaacccccatgcagcctcctgaatgtcccccacctccccttcctccctgccccggccccatcctgggctagttctggcctcacccatctgggtccttgcactgggctcctggcctcagtctcttctctggtccaggatcttcctaaagccaaaccctcctctgtataggcacccccatggctccccagggttcctgggacagtctgagctcctcagcctctagcatcccagcccttcccacgccatccctcttccccagctctgtttctagcacatatgtttgttccccacctcaggcaggaaggaaacactaaccacatcctctgcttgtgatgaaggaggatcttaagcaagtgacagatgaagctattgaaggaaagtgggttccagctgggcgtggtggctcatgcctgtaatccctgcactttgggaggccgagttggatagatcacttgaggccaggagttcgagaccagcctggccaacatggtgaaaccctgtctctactaaaaatacaaaaattacttgggcgtggtggcacgtgcctgtggttccagctaccccggaggctgaggcaggagaatcgcttgaacccaggaggcggaggttgtagtgagccgagatcgccccattgcactccagcctgggcaacagagtgagactctgtctcaagagaaaaaaaaagaaagaacatgggttccttcttgaatgctccccttattcctcccaccaaaggtaacgttctgggggagaaggaggcctgggtgcagctactagcatctgggggagaggcagttggtaactgtacccagggtcccttgcttctccatttctggagatccatccttgccctcctctccgagatcctcctagaaggctgtagctccattgttctcagcttctgggaagccgagaggacgttctgggaagaagaaagtgatgtataggccattgttttctcacgggaacctctgtccccaaatcctccagacctccacatccaggcacctggtgccctctcctgcctctgtctctggtcacttccacaatccaggagcccaggcgtctagcttcctccttcctcaggagttcaggtctgcagtcccctccttcctcaggcacagaagccccatctccactcccctccatcctcagaacacaggctcccggcccccttcct[137 bp omitted]cggtgaaaccctgtctctactaaaaatacaaaaaaattagccgggcctggtgacgggcgcctgtagtcccagctactccggaggctgaggcaggagaatggcctgaacccgggaggcggagcttgcagtgcgcggagattgcactactgcactccagcctgggccacagagcgagactccgtctcaaaaaataaaaataaaaaaaacttctctctcagcaggctcaggagtcctccccctccccgcactggccctgccacctcttttctaatttatctatttattttttattttttttgaggcagagtctcgctatgtcacccaggctggagtgcagtggcacaatctcagctcactgcaacctctgccaggttcaagcaattctcctgcctcagccttccaagtagctgggactacaggcacccgctaccacgccaggctaatttttttgtatttttagtagagatggggtttcaccgtcttagccaggatagtctcgatctcctgatctcgtgatccacccgcctcggcctcccaaagtgctaggattacaggcgtgagcaccgcgcctggccttacttttttatttttagagactgggcctcactctgtcacccaggccagagtccagtggcaccatctcagttcagtgcagccttgatctccctgggtcaagcaatcctcccacctcagcctcccaagtagctgggaccacaggtgtgtgccaccacacccggctgtgcccctcttgtcttaggatggtcttcaggtctcagcttctccaccttgccccttcaatcccttattctgtctgagaaacttacatccctcactctctccaaatacaaccacttcctcaatattcaaagggcttcttccgatgctgggcacggtggctcacgcctgtaatcacagcactttgggaggctgaggaggagggtggatcacctgaagtcaggagttcgagactagcctggccaacatgtgaaaccccgtctctactaaaaatacaaaaattagctgagcatggtggcacctgcctgtagtctcagctacttggaaagctgaggcaggagaattgcttgaacccaggaggcggaggttgcagtcagccaggattatgccactgcactccagcctgggcaacagagcgagattccatctcaaaaaaaaaaggtcctggcgtggtggctcacacctatattcctagcactttgggaggccgaggtgggcagatcacctgaggtcaggagttcgagaccagcctgaccaatatggagaaaccccatctctactaaaaatacaaaattagccaggcatcgtgatgcatgcctgtaattccagctactcgggaggctgaggcaggagaatcgtttgaacccgggaggcagaggttggggtgagccgagattgcaccattgcacactccagcctggtcaacaagagcgaaactccgtctaaaaaaaaaaaaaaaaaaaaaaaggctttcctggaataaattactttcttgtctgtctttggtcttttttttttttcagctttattgagatacaattcaatggatttgagtatattcagagtcatgcaacctaacaccacaagctaactgcaggatattttcatcaccctgaaaagaaaccctacacccattaacagttaatccattccacctacagccagcctaggcaaccactaatctttctgcctattctggacacttcatatgaatggaatcatcacgtgatcttttgtgactggcttctttcacttaacgttttcaaggtttatccatgtttagcatatatcagtatatcagtccttctttcttttcactgccaaataatgtttatgggcctaggggtagaattgctaaatcacgcggcagctgtgtttcattagtttgaggaactgacagtctgtttcctgaagtggctgcaccattttacattcccaccaacaatgtatgagggttccaatttctgcacatcttcaccaacacttgttattatttctctttttaattacagccattctagtgaatgtgaagtgatatctcatagttttttgtttgcttgtttgttgttgttgttgttgtttggagacagagtctcactctgtcatccaggctggagtgcagtaggcacaatcacagctcactgcaacctccacttcctgggttcaagtgattctcctgcctcagcctcccgagtagctgaggctacaggcatgcaccaccacacctggttaatttttgcatttttagtagagatgaggtttcaccatgttggccaggctggtctctaactcctgatctcaaatgatccacctaccttggcctcctaaagtactgggattacaaacgcgagccattgtgcccggcctcatagtagttttgatttacacttccctaatgattgtgtccagcagcttttcatgtgcgaactggccatttgttagtgggttttgcttcttttaaaaactgctgagccatccataaacattttcaaaatgcagggtatgtttttcagtgttaaggcaactgttttgatgtgttttcctttgctctctatcaccaaatactgtacatacaaatagtaagactgggctttgtgttgtccattgttaatcctaaatgcaacaaaacacatggagactttgaaaatccttcagaataatgctatagttaagattttgctaaagcaagtgttttttctaactccttgagctgcatattgccttgagtaatcatcatccgaattgtatcctcttcggtggcacttttgtttcttttgaattcttcccttgcccaatccttcaggtatttgcgatcagaatcatttggaacttgctgaattgtttggaaaatccttctgtagaggagaagaacttgttgccttctgatgaactgctttaacattagtgttgctggggtaagcgggaagtggccatgtctgccagcagtccgccggagcctcagctggtctttttccttctctctttctccattccttaccctatctgtccctctcccctcgtccatctcttcatctcaccataacccttttttttttttttgaaacggagttttgctcaggctggagtgcaaaatctcagctcactgcaacctccacctccccggttcaagcaattctcctgcctcactctccagagtagctggagtagctgggattacaggtgcacgccaccacgcctggctaatttttgtgtccttagtagagatggggttttaccatgttggccaggctagtctcaaactcctgacctcagatgatccacttgcctcggccttcctaaatgctgggattacaggcgtgagccactgtgcctggccttcaccgtaacttttgtgtatctttccctctcccacatttactctctatgccgatctctgtccccacctccccatagctgtctttcctttctctgtcccctcctttctccacccagcacccccatacttaggcctctgtatgatcagtggcaccaggtcaggctggagccagtactaatgggtacatttgtgtgtagacccagggtgggtgctgagggccaggcccaggcacctaggactataaatgcccctgcaatgtggttggcctcagccctgctctggcaggtgacccccgggccctgggctctgaggctgagcccttctctgaggtctcccttgtgccccgtactgcccctgcagtgggaggcctggagggaaggctggcaggaggaaccacactaaccagtctatctccctctacccccagctgtgcctcggtgccttgggtttcctacagggtgagtgccccagaaggaacacagaaagctggtgagttggtctggatttgcagcagagtgtggggtagggaggggctggttgtgctggctcaggttgggaggctgtctggcatggctctgtgacaggggattggccacagtggaacttcttgggacagggccctggccagctggacaaggggctatttgggcagactgtgtgccaggagattggcaaaactggttctgaggaggctgggcgggccttttggggacagatggtgcaaaagaagcaagtttaagctaatattgatatagctgacttcatgccatggctttgacatcaagctccccatcattctgtgaagtgtgcaccgataccccctttacagacacagcagcttaagccccaagaaaggaggtgacttgcccaagttcacttggctagaaagtggccgagtcggctgggcaaggtggctcacgcctgtaagtaatcccagcactttgggaggccaaggtgggaggatcgcgtgagcctgggagaccagcttgggcaacagattgagtctcctctctaaaacagaaaaagaaaaggaaggaagggagggagagagggagggagagaaggagggagggagagagggagagaaagtggcagagtcagaattagaatctgacgcatttagcttccaaatccaccggattattcttgactgcctcctctgggctcctggttccctcaagcccgacggacgtctgtgttttatgtttccagggctgccgcttcatcacggctttctcggaaaacgggggcgctgagaagcccaacttccagctatatatgtcgccaccgcccacagggcccccgacggcgatgctggtgacagcgctccctgcgtgggcgccactctccccgtgctccccgcgcctgcagccaggcacgacggtgtgggtgtgcccgcccggggcagaggagctgcagggctcgcggcaggcggcgctgtgcaagcagcgacgtcgcggcccgaggaagtggaggcggtgaacgcgcgtgggcgcgcctcccgggacacggcgctggctctgcggcgctacctgctgggcactccctaatcgatggtgacgccgtcgctgccgcccggcgaccggcacaaggagtttgcggtggtggcgggcgctgggcccacgctcttgaggcgcctcaagccccctaagcctgttctgctggaccgcgtaggccaccctgcccgctggccccatccattgagccttgaaggcttccagaggcgctgcagttgcagagagcaggagacctatccggcacccgcgtcgtggccgcccatcctgtcgcgctgctggctggcctcagttgtctgcaagcgagaagcaaggcctgtggccacgcgtttggacgaccgccgccccagggtcgctggagtggtctccacacggtgccccactttgccccagagcgtcccgggcgccgagactgcgtgttcctggaggctagtggcccgggtagcctgtgctcctggtgctgcgacgccgaccgggcgtgcgtgggctctgcgccctggcacggtgctgcgctctgtggtggaccagtgcactctctggctttgcgctcttcggctggcgtgcaggtgtttttccccccgaggccgccgcggcccgcgggggttgacacctacgatccctccttcgcgcttatgccctggtgggcgcgttcagctgcagcttcgcaagcatggtgcagccaaacttttccaacgtggaatttgcacctgccccggtgctcccggactgcctgctgggcccgagccgcgtcatgagcagcattctgaccaaaggctggtcccggctcagggcttcgcctggactgaggtggcctaggggcgcaggtgcagggcagtgcaagacctgtagagaggcggggcgcccatgggcatgtttagcttcggcatcgcccaaggcgcaggcttcgggacccaggccgtagggcagccggcggcagatgagcagccctgagggcccaagggtttggggaggtgaaccggcaatgggattcgtggatattaggattggagaaaatcataacactacattccattgcttatataacaagagaggtagttttttttgtttttgtttttgtttttgtttggtggtttttttttgttgttgttgtttgttttggtttggttttgctttgcaccccacccgaccctcaatttttgtatttttactagagactgggtatcagcatgttggccaggctggtcttgagctcctgaccttaggtgatccacccgcctcggcttcccaaagagctgggattacaggcctgagccactgcgcccggcccagagaggtagttttaaaatacaagtctgtccctcctccactcaaaatctccttggcaattatcccatctcccagcaaaagcagtccttacagtggtttaagagttcctacatgatgtgttcccagcacactgctcatctcatctctctcccttgcctcactgtactccagccacactggttgccttactttcttcttcctaccccagggcctttgcactggctgtccccatgatatccctgtggatcactctctcccctccttcaagcctttgctcaaatgtcacctctccactgaggccaacctgactgcccaatttaaaattgcaatccccaggccagacatggtggttcacgcctgtaattcccaccactttgggatgccgaggtgggtgaatcacttgacaaggtcaggtgttcaagaccagcctggtcaacatggagaaacctcatctctaccaaaaaatataaaaattagccaggcgtggtggcacgtgcctgtaatcccagctactcgggaggctgaggcagaagaatcacttgaacccgggaggcagaggttgcagtgagcagagatggtgccactgcattccagcctaggcgacagaatgagactccgtctcaaaaataaaataaaattgtaatcccccacccccaacattacctagccctttcccagaattttttcacagaatatatcactttctgtataattactttttctattatctgtctacaacacatacattccttaagggcaatgattttttttaaccgtttaataacctttaaaaaaaaaaaagaaaactgaggcagagtctccctacgttgcccaggctgattttgaactcctgggctcaagggatcctcctgcctcagccccaccaaaatgctggaatttcaggtgtgagccaccgtgtttggcctgttgtcaagtttttgtttgtttgtttgttgttattttgtgatggagttttgctcttgttgctcaggctggagtgcaatggcataatctcggttcactgcaacctacgcctcccaggtccaagcaattctcctgcctcagccccccaagtagctggggttacaggcatgtgtcaacatgcctggctaattttttgtatttagtagagatggggcttcac[140 bp omitted]aatttaaagtttccaacctgaatgaattttcacatatgttcatctgtgtagccctcacttaaatgaagctattagaacacttctatcaccccacatagcttcatgaggtcagattcttacaaaaagattttgtgcactattaaatctccagcacctgtgacagtgcccagctctcagcaaacatttgtggaaggaatagtaatggttgtaatttgttaaatgtgcaccacatcatatgccaggcactgggctcatagaggcaattattgcccaaggtcatacctttttattacagtgtaaaatgtgaacagtggggtgggagaagggataaaataataatagctagtactgagtgcataactctgtgcattatttctttttaccttcccgcttgtctttgaggttgactatctaataatattgtgggtttttttgttcttttttttttttttttttttttttttttctgagaaggagtctccctctgtcgcccaggctggagtgcagtggcactatctcggctcactgcaacctcagcctcccaggttcaagcgattctcccgcctcagcctcccgagtagctgggattacaggtgcatgccactacgcccggctaatttttttagttttagtataaacagggttttgccatgttaaccaggctggtctcgaactcctgacctcaggtgatccacccaccttggcctcccaaagtgctggaattacaagcatgagccactgcgcctggcctgttttttgtttttgttttttcttttcttttttaagatagagtctcactttcttacctaggctggagtgcagtggcatgatctaggcttactgcaacctccgtctcccaggttcaagcgattcttgtgcctcagcctcctgagtagctgggattacagatgcgcagcaccaccacgcctggctaatatttttgtttgttttttttttttttttttttagtagagacagggtttcaccacgttggccaggctggtctcgaacttctgacctcagatgatctgtccacctcagcctcccaaagtgctgggattataggtgtgagccactgtgcccggccaatttattttgttttgtttgagacagggtccttttctttcacccaggctgctgtgcagtggcgcaaccgtggttcactacagccttgacctctgggctcaaatgatcctctagcctcagcctcccaagtacctgggactacaggcgtgcaccaccatgcctagctaatttttattttttgtacagacagggtcttgctatattgcccaggctggcctcaaattcctgggatcaagcaattcacctgcctcagcctcccagactgttgggattacaagtgaaaaccaccaccctcagcctataataatattgtaacgattgcttttccctggggagaggggccgagaccagagctcaagtctcttgccaagctcacacagctagaaagtggcagtgtctggatttgaacccaggtctgtctgtgtccacagtgcaagcttttaaccacctttttggttgtggggggtgttgttttgttttgtgttttgtaccaccttgcaaagacttataaagtagtctagacttatgtgctaagtggcaagtgcttttataaataatgtacatacattatataatgttctctttacagtcatcctggagatgggtctttttgttatcctcatttcatagagaagacagttgaaggtttaagccatgaaatcactgcccaaggccacatgctgaacagatgtcagctttgaaccccaagcctgcttgggctgctgggaaacaggcatgttgtctcagagggcaccgcgctcggcgaagactcagcgagactggacgctgaccatggttctgaacacactgtgctgcgggacctgggcttttcctgtaaccctgaaatcccattcaacctcttacggtcctgagaaacaacggaagaccagggagatgagagaaaagtgagggaatgctgagagagagaggctgggtttcttagaaatgaagacaaggacttcaattcatttatttataacagctcagagctggactctggagccaagagtcctggatgcaaatcctgctccaagctgtgtgattctgcataagtcaattcatttctctgactatctacttcccctctattaaaggtggataatagtatgaacatcataaggttgttgtggcattttaaattaaattatttattattcctattattatttaatagaaatagagatggggtcttgctatgttgccaggctggtctcaaactcctgggcttaagcaatccacccaccttgacctaccaacacacttggattacaggcatgagccactgcacctggctctaattttttatgtttatttatttattattattattatttttgatatggagtctcactctgtcgcccaggctgtagtgcagtggcgcaacctcggctcactgcaacctccgcctcccaggttcaagcaatctttccacttcagcttctctagtagctggaactacaggtgcctgccatcactcctggctaatttttgtattctcagtagggatggggtttcatcatattggccaggctggtcttgaacgcctgacctcaagtaacccacctgcctcagcctcccaaagtgctgggatcacaggcatgagcaaccgcgcctggccttatttttattcatttatttatttatttatttatttatttatttatttattttgagatggagtttcattcttgttgcccaggctggagtgcaatggcaagatcttggctcactacacctccacctcccaggttcaagtgattctcctgcctcaacctcccaagtagctgggactacaggcacaggccagcacacccacctaatttttgtatttttagtagaaatggggtttccacatgttagccaggatggtcttgaactcctgacctcaggtgatctgcccatctcggccttctagagtgctgggattataggcatgagccaccacacccagccttttttttttaattaaaaaaaaaaagtagagatggggcctcaccatcttgcccaggctggtcttgaactcctgggcttgagtgatcctcctgtcttgacctcagaaagtgctgggagtacaggcgtgagccactgcaccctgccagcgttttttaaatgacttcatagaacactgtctggcatgcagtaaatatttgccagtattactttgcagcaatttttttttcattttcttcaggctaggcctgttctaggcactgcagatgcaacagtgaacaacacagacaacatccctgccctcagggagctgacactctagctcagtccatacgaaaactctatattccatctttttttttctatattccattgtgatagaaaatatgcaaagttctacagaacacaagattattcttaaaagttcactttggggtcaggtgtggcggctcatgcctgtaatcccagcactttcggaggccgaggtgggcagatcaccggaggtcagagttcgagaccaacctgagcaacatggcaaaacctcatttctactaaaaatacaaaaatcagccagatgtggtggtgcatgtctgtaatcccagctacttaggaggctgaggcatgagaatctcttgaacccgggaggtggagtctgcagtgagctgagatcacaccactgcactccagcctgggtgacagagtgagactctgtctcaaaaaaaaaaaaaaagttcactttgtaggtggctagcttcgtgcactgatagcaatgaataaataacatcccttcctgggaagaaggaaggaatatatgtctccagttccccacagcatacacacatgcgcacgcacacacgcgcacacacacacacacacactctcacatcctaccctcaagtctgcttaatgtggcaagttgaagtcctcgatggccagaatcaatgcaccatacatttgcactggcatagagatgctcacataattgaatctggctgtcttcagatgcagcctgtgctctcgagctccctacagacctattctacacccaggccgtgctgatcattttgtccctcagtcccactcttttctttctgctgatacatacagacccagtttattttaaattgggaacactgatagcttctgaatgttgagtttccagtgccagggaccctggaggcccggggtatgaaggcaggtcggggatgaggctaaattccaggatccaattatattgcatccttccctcatctcatctctaaatattttgactgaggaggaagtgagccctttcatagagtcccatcccctcctagtcttccctggtgatgccactccagttccaggtctcctgtgagggccatacatgctctgatgggaccacatgtcagcttgtgaagcacagacttaagtgtgtggctgggcacagtggctcacacttgtaatcccagcactttggaaggcagagatgggtggatcacttaagctcaggagttggagaccaccatgggcaaaatggcaaaaccctgactctacaagaaatacaaaaattagccaggtggcatgcacctgtagtcccagctacttaggaggctgaggtgggaagatggcttgagtccaggaggtggaggttgcagtgagctgagatcgcaccactgcacctcagcctgggcaacagagccagaccctgcctcaaaataaaaaagaaaaagaaaaaagaaaaaaacaaaaaacaaaaaagtaatttaaaatctaaataaataaataaatgaaaaaggcctaaatgtgtgcccaccactcaggtcacatgtgagtctgagaccttgtccagttccaagatggcaggactccaaaacaccgtccatcttcagctctaagaccatggcagtggctgcatcaggaccaaacaacacacctgaagctgagccaaggcttgtgcctgtgctcctggggggacctgagcctgaacctgtggccatggctcatctggggcttgcacaagtgaccgtaaatgaaccctgccctgaacctgtagctgcagccgcaccagtgcctcgacttgtgactgtgaaagaaccacttcctgcaactctggctgtagctgaaccagcacctataccacctaccaaacccatagctaaccattgtctacaaccatgtccaaaaccaagacagtatctgtgtctgggtcagaactgtctcatggccaagctggggctcaaggtggtgacagtgactaaaccaagcttaaagactctggctgtggcaaaattaggacttgactgtagcaaaggacaaggggccatcacaggggctaccacctgagcctctgggctaccatacatctagactttttttctttctttctttcttttttttttttttttgagaaggagttttgctcttgttgcccaggctggagtgcaatggcacgatctcggctcattgcaacctctacctcccgggtagaggttcaagcttgaaggttctaccttcaagcgattctcctgcctcagcctcctgagtagctgggattacaggcatgtgccattacaccaggctaattttgtatttttagtagagatggggtttctccatgttggacaggctggtcttgaactcccaacctcaggtgatccgcccacctcagccttccaaaatgctgggattacaggcatgagccaccgcacccggcctgatttctttttttttttaaagacagggtcgggcctggcgcagtggctcatgtctgtaatcccagcactttgggaggccgagatgggcggatcacaaggttagcagtttgagaccagctggccaataatggtgaaaccccgtttctactaaaaatacaaaaaaattagccaggcatggtggcgggtccctgtaatcccagctacttgggaggctgaggcaagagaattgcttgaattcgggaggtggaggttgcagtgagccgagattgcaccactgcacttccagcctggacgacagagcaagactccatctaaaaaaaaaaaaaaaaaaaaaaaaagacagggtcttgccgtcacccacactggagttcaatgtcacagtctcagctccctgtagcctctgtctcccaagctcaagcaattcgcttgcctcaacctcccgagtacctgggattacaggtgtgcaccaccacgcctggctaatttctgtatttttagagacggggtgtcaccatgttggccaggctggtccaaactcctggcctcaagcgatctgctcacctcagcctcctaaagtgccgggatcacagacgtgagccgtcgtgcctggccagtatacatctagattttcaatgaccacttgttccccatgcctgggatctgcacctacatgctgagctgatgcccctagtccctcctcagcagcctccctgcctcctaactgtgggtctcctgtcctgaagggaggcagcccatgtgctttgtcacagggtgcatctttggtattaccatcactgctgtcaagcacaagtgtggccctatccagataagaatcacagtgtatgggatcttgggagaccccatccttctctgttcatcaattttgggagctttttttctttttcgagacagggtcttgtttagtcacccaggctggagtgcaatggtgccatcatagctcactgtagcctcaatctcctgggctcaagtgatcctcccacctcagcctcccaagtagctaggaccacaggcacacactaccatgcctggctctttaaattgttttgaagagacagggtctcgctatattgtccaggctggtctcaaactcctggcctcaagcaatcttctgtcctcggcctcccaaagcactagaatcacaggcatgtgagccaccatgcctggcaggtcatttttgtcacctctaaaatagaagcaatgatataggctggggcggtggctcacatctgtaatcctagcgctttgggaggctgaggcaggcggatcacctgaggtcaggagttcgagaccagcctggccaacatggtgaaaccccgtctctactaaaaatacaaaaattagctgggcctggtggcgctcacctgtagtttcagctactagggaggctgaggtgggaggatcacttgaacccaagaggcagaggttgcagtgagcagagtgtgccagtgcactccagcctgagtgacagagcaagactgtctcaaagaaaaaaaaaattgtttaccgggcatagtggctcatgcccataatcccagcactttgggaggccaaggtgggcggatcacctaaggtcaggagttcgagaccagcctggccaacatggtgaaatcccatccctactaaaaacacaaaaattagctgggcatggtggcgggtgcctgtaatcccagctactggggatgctaaagaaggagaatcacttgaacctgggaggcagaagttgtagtgagctgagatcacgccaccgaactccagcctgggggacacagtgagagtctgtctcaaaaaaaaaaaaaaaaaaaaaaaaaaaaaaaaaaagatgcaattatacaggtccaaagtcccttatctaaaatgtctggggccaggtgcatttcagattttggaatttagaatggtcaaaccaggcaaatgccacatattatataacactcccagtgtgtgttacataatcacaaacattaatatctttgcagtgaaatgtctgaatagtcacacaaaggaggataaattaagactatagcagccacacatgagttcaggttagcttttgctgataattgagttttaacatcaaacacacaaaacatattcagtcttcaggtcttttggttgttgttgttgttgtttgcttttgtagatggtagataagggattgtggctctctagctcctccctcagcaggttcctgtgaggtgagaatgagttaacacaggaaaagcacttggaacagagtccaactcatggtaagtgtcatatgagggggtgtttgctgtgtttatcatttcctgacacaggcatatgaagcttccaaattccccgagctgtgaacatatcctaggaccacatgcagccactagcatgtcccaaatctctcctccaggaaggtttaggggctctgctctggttagaaggttgtgggggctagagtatgtttaatccgggttgctggctggggggacctgatgaaggttatgatgtactagtgtacccagaccaaaccgagggttgggctgcttattctcacagcctaataatgagacacaaataaactgggaaagaagagaatttttatttctgtaactgattacagggagaaggcctggaaattatccccagatcaactcaaaattataacgttttccagagcttatatacattctaggctatattagaagaaattaatcacttatgtctttagatgaatgcaaacttacatgagtaaatttacttcatctaaatgggtccaggtgctggggtgattacccttatcttgtctcctgctaaattatggaggcttggggagttcctttagtctccaataaagcttgtttgtgaaggtctggggagttccttcagacccccaataaagcttgtataatcttaaatgggaactgttaagaattccttcgtgaggctgggcatggtggctcatgcctgtaataccagcactttgggaggctgaggcgggaggatcacctgaggtcgggagttcgagaccagcctgaccaacacagagaaatcccatctctactaaaaatacaaaattagctgggcatggtggcgcatgcctgtaatcccagctactcgggaagctgaggcaagagaattgcttgaacctgggaggtggaggttgtggtgagctgagatcgcgccattgcactccagcctgggcaacaagagtgaaactctgtctcaaaaaaacaaaaaataaaggaattccttcatgatcttgtcatgcctcaagggccaggaaaggcctggcctaaactcttggtgagcttttgttacattccagcctttgtatggacgctggctctaccagcgttttttgttttgtttcttttttcttttttgagacggagtctcactctcttgtccaggctggagcacagtggcgccatctcaactcactgcaacctcctcctcccagattcaactctcccaggtagctgggattacaggtgtgcaccaccatgcccagctaattttttttgtatttttagtagagacggggctttactatattggccaggctggtctcgaactcccgacctcagatgatcctcctgcctcagcctcccaaagtgctgggcttacaggcgtgagccaccgctcctggcctctatcagcttttagtatttaacccaaccacagtcagtgctaaaacagttgttatggaggcctgcgttcatgagatgtggcttgccacactaggccacccctcagcaccactatagaaaaacaatggtggcctgggttcaaattccggtttggcacttgatatctatgtgaccttggataaattatttaacctctctgggcctcaatttcttcatatgtgaaatgagaatgatgaaaagatctgattcatagggctgtagtgaggattaaatgagctaatatatggaaagcacagaaaatatgcaaagctaggacccgagacgtgaagccatgatgctgcatacctgcctccacaccgcctgggagtttgccctgccactcaggggtcaggatgccccccagtgctcttaaggctccccagcatccagtagcccccaccccaggtatccagaaccttcagatactcagggctccagacttatactctcaccaacatgatccctcttttcccaaggacttgacactcctgtgttccttcctcaattaattggaattttagaattttttttttttttttgagactgagtctcactctgttgcccaggctggagtgcagtggtgagatcttggctcactgcaacctctgcctcccaggttcaagcaattgtcctgcctcagcctcccaagtagcctgggactacaggcacatgccaccacactcggataatttttgtgtttttagtagacacggggtttcac[140 bp omitted]actaacaacatccctgtggctgccagttgagaacagattacagggcttgtgaaggaatgaggcctggaggaacaacagtgaggaggctgctgcagtagtcccggcaggagacaatggggcttggaccagggtggggcagtgaacgcaggagaaatgtgggctggaaaccaccaagtgaggcaaaataaggaaatcatggactgggagaaaggaggtaccccttgatctggaaggacaggtggaggctcttggtaatgggggaagcccttgggtcctgtctgaaggctctcctgtttactggatgaggtgggcacacctggctccttggtaggattactcatctagattcctgagaagaggacttgcaagtattgtgttaggacaaatctggatattgaaatcaagactcccagtttaaaaaaaaaaaaaaagaaggccgggcacagtggctcacgcctgtaatcccaacactttgggaggccaaggcgggcggatcacgaggtcaggagttcaaaaccagcctgaccaacatggtgaaaccctgtctctactaaaactacaaaaattagcttggcatggtagtgcacgcctgtaatcccagctactcaggaggctgagagagcagaattgcttgaacctgggaggtggaggttgcagtgagccaagatctcgccactgcattccagcctgggagacagagcgagactctgtctcaaaaaaaaaaaaaaaaaaaaaaaagattcccggatagaggctgggcatggtggctcacatctacaatcccagcactttaggaggccaaggtgggcagactgcttgagctcaggagttccagaccagcctgggcaacatgacgaaacctcgtctctacttaaacacacacacacacacacacacacacacacacacacacacacacacacacacacagaaagattcttggttagctgggcacggtggctcacacctgtaatcacagcactttgggaggccaaggtgggcggatcacaaggtcaggagatcgagaccatcctggctagcacagtgaaaccctgtctctactaaaaatacaaaaaattacggggcgtggtggcaggcgcctgtagtcccagctactggggaggctgagacaggagaatggcgtgaacccaggagacggagcttgcagtgagccgagactgtgccactgcactccaacctgggcggcagggtgagactctgtctcgaaaaaaaaaaaaagaagaagaagaagaaaaagaaagattcttggttagtagacgagggtggggcatcctagatctgcaaaggccccactctcaatatcccagaatccaaccccctcaacctccttatcctccacccctccccgatgctcaggaattcagcccctctgaagaccccagctcttggtcactcctgcaggggaacccacagcagctggggctgtcagttatcctgggcgacagatggctatggttgtacttccacacctcagaaccatgggcagaggcaggtctggagcaagaaccgcccacactgcatctcttttacaaccggcagcacacacgtcactgcacgtggctgaaggttgccactcacacaaggcagactgtgcagtgacttcattcaggcaggaccatgacatgggcagtccagatccactggtcttcgtgcatttgggccccgcagccacctgataccctgagccaagccttagtccccacaggagactgggggccctgtgctgtccctgtagccccaaaggggccccttagccactgccaccaagtgtgacacctacacccttcgaggccagtgccgtgcctggatatgccccttccccagctccctgcctacgctttgggagtgcttccatgtctgtgtacaccctgtcaggcctcagtgtcaacactgagccctcgagcttctgggctggctgccgtgagtgacccttcaagggaaagggttataggctgctgggtaaaggggattctgggacttaggaatgacactccttagttctggaggctgattcctggggcaagggtgtagggtccctggaaggggacagcctctgggtcctgggggcaagactgctgagttggggggtgcggggaaaataattctagggcccagagacagggctctttgggtctggggccagggcttctgggtcctgggcatgggaacaacttggctatagggctgggactgctgggttctcaagttctagagactagaacacctaggtggtgacaactccagtatctggggtgagcgctctgagtcccagagccagacttatttatttatttagacaggatgtcactctgttgtttatttagacagggtatcactctgttgccaaggctggagtgcagtggtactatcatagctcactgcagcctcaacctcccaggctcaagccatcctccctcctcagcttcccaagtatctgggaccacgggcatgtgccactatgcccagataattttttaattttttttgtaaagatgaggtcttcctatgttgcccaggctggtctctaattcctgagctcaagtgatcctcccaccttggcctcccaaaatgctgggattacagatgtgagccactacgcctgtcccagagccagacttctatgttctggggagtggacttctggtttcttagcacagagacttctttactctgtgaggcagggattgctgggtctgttgcctggagagctccattctagagggtgaggaccacaggatgttggtagggattcctggaagctgagagcagggacatttgcactataggggtggccaaatgcttgggtcttggaaaccagacctgggagtcctggtgtgaatacctttcccttcctgtctttctccatccccactcctgcccctgcagctattgagtgccccgaaaacaatcactatgagccatgtggcttatcctgtccagagaccccccacaggcaggcccactgggggttaccactgccctgcgggcatacttgtgcctgcgacacaggctgcttcttccttttttaagagacagggtcctgccaggcgcggtggctcatgcccgtaatcccagcactttaggaggctgaggcaggcggataatctgaggtcaggagttcaagaccagcctgaccaatatgatgaaaccccatctctactaaaaatacaaaaattagttgggtgtggtggcaggtgcctataatcccagaatctagggaggctgagacaggagaatcgcttgaactcaggaggtggagattggagtgagccgagattgtgccactgcactccagcctgggcgacagagcaagactctgtcaaaaacaaaatcctagaatctcaagggcaagccccagtgtaccagaagtgtcagactctgggatcttggaacccagttctgagccaataattccatttcctcattcaacaaccatatattgagtatctactgtgttccaggcactatttgaagtgcttctttaagtatgttaactgaatttcagaacacactctcagtccaggtcctgggcacccccatataggatccaggagttctaaagtcccaatccccaatgtttacaaaccctcacagccccccaaatcctagatgccaaacacaactgctgtggacaacaacgatcagaaccatggacagcagttcaggcatttgtagctgctgtgggcccaccccctgcccagtaccagtcatcacagcaccctggaacccctgccattacttagaaagtccagcatccttggaatgcttatagaccagcatcacctatgaacctcattcatttattcattcatgcattagttcgacaaatatttattgagcaccaactatgagctgagaactgttctattttatacacgtgtgtgtgtgtgtgtgtgtgtgtatgtgtgtgtgtgtgtgtgtatgtatgtatttgagacagtctcactcttgcccaggctagaatgcagtggtgggaccgcggctcactgtagcctcaaccacttggacttaagcaatcctctcacctcttgcccctgtagcctctctagtagctgggactacaggtgcaagtcaatatgtatgttcattttttggaaagacagggtcttactgtgttgtccaggctggcctcgaactccaggattcaagcaattggcccgccttggcctcccaagttgctgagattaaagcatcacctactgcacccagcctattctgcacataaactatatcaattctaattgaggaaaactatagtcccaacctccagaatccataattcttacctctcaagatttgttgaaaagggtggtcaggatcatgaacagcagtccaagcatttctaggtttgtggacagacccccagcccctcaactggccccccagaacccctgctaaaagcaggggtccaggcatccttggtactgacactgggcccccaagctctagcttgacctgccctctccccgcaggtgaatggtgactgcaagaatctgcacttacaggctccaggcaacagtgcactcatcttctgccagggctgggacaccatggccagctgcccctttggcctgtgtgggacctacaccccgggatccatgcaacactgatgctaccagcagcaataggggcggggttaggtgctgactacactggggggtacctggatgcccagagttgaggcaagcaccaagctgcctgaggacatattggcttgggcctgtggctgcttggtgggctgtctgggtgtccaaatgcctctggcaagatgccatcatgaccaccatcctgtgccaccctgccaaccactagcaccctggcccactttgttcacatctatggcatcctcctggatgccctggggcccctccagctgtgtcatgagttgctggcaccaggtccctatttccaacactgagtggtggagatgtgtctgggtgctggaccctgccgcatgctcatccgggtttgttcatctggggagcctggctccactcccgactggagttcagctcctcagctgttgcctatcccaggatggcagaccctcactgccccatttaatccctgagaccttgtacttcccgtgatgccggcctcaccccctccccactcattgtccagacttgacctcaaccattgcccatcctaaagtgtcagccctactctgattaaagccagcccccacctcatatgcttccccaatctcagccctgattatggcccagcacttcagcccttatctcttcagggactcagaacctgatcacggcccagccccgaagccgtcacccatcccagagacccatcactgcctgtgaaccacagttagccacctgggctttactgatctgaggttccagcttcagttctgtctaagctgagctctccagccccacccctgcagggcaccagatgacagatcctagcgccccctgcatggagggtgggcccacggcagccacttgcccgccatctggtgctgctgcctgccaaggttggtggcttgcaaaccctgccacatcccctaggaggccccaggcctctgcacagcctcaggcaactccatgaccgcccctttgggagcaccacatttgggctcctgggtgtctgcacggttttgggctgcctgtggggtgtgcagcccttcgaggtggtgctggagagagacctgggactgtccggcctctgccatgtgctgctgctatgtgtgcatggccactactttggtgtggacctcggtaaccagggacagtcaagagaacccttgtcctgtcatttacctcattttagcaactttgcatctctgttccggtggacaggatctctgtgtatggctctctgatgccttccttcccttccccttgccaacaccctaatttccactcttctcctcccttctcccatctgcacttctgtatcgctctccttccctttccctttccttatttctttctttctttctttttttcttgatggagtgttactctgttgcccagaccggagtgcaatggcactgcaacctccgcctactgggatcaagcaattctcctgcttcagcctcctgagtagctgggattacaggtgtgcaccacgacacccagctaagttttatatttttagtagagatggggtttcaccacattggccaggttggtctcaaactcctggccacagctcatccactggcctcccaaagtgctgggattacaggcatgagctgccgtgcctggccctcatggtccacattggaccttaacccatcctaaagtgccagccctgctctgattaaagccagtcccctgctggccgcacctcctgctccatgcagcccagtctcactgtgtctcccccactcccctcctccctcacttcaccacgccagcacgccccaccactctctcctgccccaagtcttcatctccccgttctttctcctcctcttagatctggaagtgacccctctccccaacagctgccattggctcctccccaaaccccttccctgcctgcccctccctcaccaccaacccttcctctcagaatagcccctcgtcctcttagtctctccagactcctccctggctctagatccctcccttgtccctaatgctaatccctgtttctccccacaccgccctgcccaccctactactctctctcctcctcccttggtctccacgcccctcccctgacttcctgccgtggtgctggtcgtactccacaatgcccatcctgagtgttgcctacaaccccctcgcctcggctctcccctcccccacagtcccgtgtttcttcatacctcacccccatgttccttctcacatgcatctgatccccctccactcttcccgcaccagtcctggcacaccgcctccgacctctgattccccgtggcctccatggcaactgcaaaggtaagacagcaggtggatgacttggcagctgccgaggcccgagccctgcgccccgccgcatacttgcccaaggtcagtctgtccggcagccaccgaggaccctggcacagacacgatgtggtccagtgcctgtagcctcttgcctagccagggacccactggcaccctgtcacacacacctgtcaccagacagtccttcttccaggcctgcgtggccgaagtggaccacatccctggaaccacaaagtgccccatgcctgcctgtgagctgatggctggtaccagtgtgctgtcctggagggcctgggcctctgctgtgagtctccacccaagagcggacagagccagcatgaggcagggcctgcaagagacctgggtctggtctgtagtgactccacaggtacggattgaggacctactaagtgctgggcataggctggagatagagcaccaacaggatagagtcctgcacatacctttttttttttttttttttttgagacattcttgctctgtcacccaggctggagtgcagtgacgcaatctcggctcgctgcaacctccacctcctgggttcaagcgattctccagcctcagcctcccgagtagctgggactacaggcactcaccaccacgtccggttaatttttgtatttttagtagagatggggtttcaccatggtg[137 bp omitted]tttcttagctaacacttacagggcacacaacctacatcaggggctacctgaagacagcagttcttaaagccccccagcagcattagcaacacccagagcttattgaaaatgcaaaatctggccaggtgcagtggctcacacctgtaatcccaacactttgggaattgcttgaacccaggagttcaagaccagcctgggcaacatggcaagaccctgtctctgcaaaaaaagttaaacaattagccaggtgtggtggcatgtgcctgtggtcccaaccacagctctggaggctgagtagggaggatcactggagcccaggatttggaggctgcagtgagttattatggcagtactgcactccagcctgggtgacaaagtgagaccctgtctcaaaaaaaaaaagggccaggcacagtggctcacactgtgatcccagcactttgggaggcaaaggcgggtggatcacagggggccaggagtttgagaccagcctggacaaaaccccgtccctactagacggggcaaaaacccgtccctactagaaagacaaaaattagccggaggccgggcatggtggctcacacttgtaatcccagcactttgggaggcagaggcgggtggatcatgaggtcaggagatcgagaccacggtgaaaccccgtctctactaaaaatacaaaaaattagccgggagtggtggcgggtgcctgtagttccagctacttgggaggctgaggcagaagaatggcatgaacccagaggcggagcttgcagtgagctgagattgcaccactgcactccagtctgggtgacagagcgagactccatctcaaaaaaaaaaaaaaaaaaaaaaaaaaagaacggctgacctttactgagtactctctcagttctaagccctgttctccctcaatcaatcctcccatttacattttatggatgaaggaaaccaaggcatggatggttaaggaatgtgcccgatgtcacatgcctaaaacatggcatagctggcatctgaatatttgttcgtggatttaacagattctccccaacttggagtctctatatccacgtctcctccatgtgcctcaaggattcctggccccaccctgacttaccctttttgggtcaccatcctccactccccccatctctttttgcctctaggttgaagtgctcgttgagggaatctgtctggccttttgctatagattggcctctcgcccccgcgaaacacacacactttttgtccagctctgacctaaccatctatggcaagaggtagggtcatgtgaacacaatgtggtcactctatcaggaaggattcttttcttttcttttcttttcttttcttttcttttctcttctcttctcttctcttctcttctcttctcttcttttcttttcttttcttttcttttcttttcttttttgagacagagtcttcctctgttgcccaggctggaattcaatggtgtgatatcagcttactgcagcctcaacctcctgggctcaagcgatcctcccatccttgcctcccaagtagctggaactacaggcacacgccaccatgtccagataatttttgtactttttgtagtgatgggcttttgccatgtggcccaggctggtcttgaattcctgggctcaagcgatccacctacctcagcctcccaaattgctgggattacaggtatgatccactatgcacagaccctggagaaaatttaacaccctttgccatcggttcctgcaaaggtcccagggttgcctctgataggctttgcctggccaatgattggggcccagaggcgtgagaaataagctgattaggcagccctgggtcctgtacacatcactggatcctggatatggaatcccttcagtgcacatgctgaaagtacgggcagctgccaaaaagaaggtgcaagtattattattagaagggtgagggacaggcgtggtggctcactcctgtaatcccaacactttgggaggctgaggcgggtggatcacccaaggccaggagttcgagaccagcctggcaaacatggtgaaaccccatctctagtaaaaatgtgaaaaacaacaacaacaacaacaaaacagctggcgtggttgtgtgcacctgtaatcccagttacttgggaggctgaggcagaagaatcgcatgaacccaggaggaggagtttgcagtgagctgagatcgagccactgcactccagcctgggtgacagagcaagactccgtctcaaaaaaaaaaaaaaaaaaaagggtggggaaggcaaaaaaggcattcattactagagatccctgacaggttccccacacacccatgatgctgggtgggaccacatgtctccctgtcagcagaggctgggaatagtaggcaagacccctccaaaaaaagagcaaggaagccatgtttgtcatgtccagggcacttgaaagtagctagcacactgcatggtatgcagacactgcccagtcaatgccggttgttattattgctgctataattaatccaagggggagggttgctgggaggatgctgtctggggatgctggttgaatagagggtgggtccctggcttgcctgagcctctcaagccacctctccaaagccaggctgtgttcctggcacagccaccacagcctgtgtgtgaacccaggtgtgcaagaggtggtagggctccccactccccatgctgagggccacaagtgtaaggatggagtcttcccggctgggggtgactgcatccctgttcctccttctgcaatggccagtacttccctgcaagcattctctccggtctttgttaacagtcttgcttgggtcatccactgattccccgtacttatccttacatgggtcttatctcagaacccatagctgcaccctccctccatgaccacctcaccatccccacaccacccccaacccccattcctccccagcctggccagaccatcctcatcaaggtcccttcctcctcctgtacctgctggctaggagaggctatgacccatgttccccttcagctgccctagagggcaggtatgtggcatcacagatggagtcttaggctgtcaattctgaggtgtccatggctgtggctttggtgcagttgtgtggttacagaagtggagtcaaagattggggcatgaggccaggcatggtggcttatgcctgtaataccagcactttgggaggccaaggcaagtggatcacttgaggtcaggagttcaagaccagcctggtcaacatggtgaaaccctgtctctactaaaaatacaaaaattggtcagatgtggtcatgggtgcctgcaatcccaactattcgggaagctgagactggagaatcacttgaactcaggaggcagaggttacagtgagccgagatcgtgccattgcactctagtctgggtgaaagagcgagtctctctctctctcacacacacacacacacacacacacactcatgcgcatacacacacacacacacacacacacatatcggggcgtgacttctggatcatgagaaagaagggactggggaccttgtcttcatgggtccctgatccctcttcctctgacagccccccacctcgacccctgccctgagtcttgtgaccccaccacttgttttcccaccattgtgtcccagccacagtccccagtgcccagaatactcctgctttgtcgcacatggctctgcatgcccagccacatgtgccaacctcatcagccccagtgcactgcagccaccctgtaccgctactttcaaagcctgactagctgcctgctgcaggagggctgctgcccagcccttggggtcctggtaaccagggtgccccagtgctggcctgacaagtgccaagatcactgcaaggcctccacaggtagctggcacagctgcctgtcaacccagtccctgtccagccccattgtcctggaggaatcacaggtctgcactgccatgggagctgtctgtttccacacatttggaggagctcactatgaattcctcatctcttgtgtccactgcctggtgcgtctctgtggcgcagcccatgccaaccttgagccttcagcctggatctgctcccacttctgtggccacacagcttccccaaggccctgaccctctcaccctgtggcccgaggacatgagcccaaaagacctcaaccacagtgaggtgaggctccaaaggccccacactgacccactcttcctcactgtcccatctactccccggtcacccatgatgactactcttttcctactgatgctccctctagtagttctgcccctggcccttaaagatgtctactccaatttcctagtggccctagtggcaccagtggctactcaccaccttccccttgacttgcttgttgacccctccccacgactctccacttgtcattattattattattgagacagagtctcatgctgctgcccaggctggagtgcgatagtgtgatctcagctcactgcaacctccacctcccaggttcaagtgattctcctgcctcagcctcccaagtagctgggactacaggcacgtgccaccacgcctggctaatttttgtatttttggtagagacggggtttcaccatatagcccaggttggtctctaactcctgatgtcaagttatccacctgcctcagcctcccaaagtgctggaattacagggggccaccatgcctggcatccacttgtcattattaaccgccattgagattccacttaccctcccattgactctccattgaatcctcaatagtcatcctattaactccctaattgaatcccctcaacccacaggctcagcctcatctctgcattgaccctccctgtcattggacatcccattaattatttcattgagtcatccattgccctcccccagctgatcctactacgtttgtttgtttgtttgtttgttgagacagagtctctctgttgtccaggctggagtccagtggcgtgatcccggctcactgcagcctcaaccttctgagctcaagcaatcctctcacctcagcctcctgagtagttgggactataagcacacgccaccacaactggctactttttaaaattttttgtagacagggggtctcgctatgttgcccgggctggtcttgaactcctgggctcaaatgatcttcctgccttggcctcccaaagtgctgggattagaggcatgagccaccatacctgaccaatcctactgctgttatactgacttgcccattaatcccatttactgtcctattgaccccacccgacaccgtcccgacctcccacactgatgctttctgagcagtttgttgaccttcccagtgatccattgactggcctattaatgtcctcatttaccccctgtggacctgcccatcaagcccccacccctgccatctactgattctctactgagcttcctatactggatatgactaactcctgcactgcattcccctgcttttctattatccctctaattgagcctctctttgactcatcttctcaccctgttgagttttctatagtgtcccattcattcattggcacaccttctcctagagcactgtccaagtctcactaggccctcattgatcatagaggcatccttcccagtaggatgttgcccattaaccttgaactgccatccacaaacccagcagcgtttgtcagtcactgactacccttctgactccacccccatttactctccaggggagcccccattgtcgcccaaagccactaagcctcggtcctcagtgatccacggagttgtccatcccttcctccattgcccttttctagatcctccccttgccccccgctgctggcccctcttcactgactcttatccattctcttattgcccctcattgaacttccactgacctctcatcaactctggccatccaaccactctgccatggatccccctttgaatcctatactgaccccccattgagccccaagcttacctcccaccaaatcctcctatgatccctaatgactccccccattaaccagccactaaggttctctttgacccctctctgatcctttctgctgactcccccactactcagtgaccatctcctgctgctgttcaacctgcctgcatgccctctgtgtaggtagacggaatttgggaatcgctgcccttctcttatggccaccacctccacacccaactttggggctgccagctgtacatggacacagactttggcctcttgctatgactgggacagcctggcacttgtgatgctgccatggccatatggaccctacctgtgtagactctggccccagtgaccctattacatccttgcccaatgcccggaaggttgctaagttgccaggttgcagccaggtctgtgggcccctctgccctggattttgccagatggccgtgcatgccctattcaccaggaatgggcagtgagtgtggctggcagtggcggtggatcccttggagcccggctatgcagcactgtgaccaggcccattcctcagcaagtgcctggcccactgtgtgccaccaatacagcgcccactgaaccatatactgggccctggctgcctacactgtggcttgcagggctctgggagtctgccttctgtcacgagtgtgctttcgagagaggggtaagctctgaagagccctgacatgggccaccaggggacggtcgcgtcaggaccaacagaagttcaggcctgggcagtggggctaggcgaggaagggtgggtactggagaacagttaggaccagattagatgcggcaagacaggcaggggtatgacttgatttgattggtctggtttgattaacaaggtctttttaaaatttttaacaatttttatagagacaggggtctcactatgttgcccaagcttgcctcgaatccttgggcgcaagcggctctccctcctcagcctcttaaagtgctgggattacaggcgtgagccacagcgcccggcctgattaacaaggtctttctgtcttttatgcctcttttttcggtgtctctatgtctcctccgtgccgctggctctctgcatgtctctctttctggacctccctctgccccgccccttcccctgttcccgttccccttctctcggttcctcgttgtttcttccccgggcacacccgtgctgctctctgcgggcatcctccatctccgcctcccccatccgaccctggctatgtctcccccacctctctctgtctctgtccctgaccctcccacccccgcggcccgccccagctttgcggtgcccgctgcgttcgcgctgagctgcgcgctacctggccacatgcgcgggtgacagccctgccgggagcgctgagtatgcggccagggcttcccgctgagcggcgcctctgagtgcccgcagccgaatgcggctgcttccttgcaggcggacacccaccgctgggcaccgtctggtaccctgcccctgcggcccccgcccccgcgctccgcccctgtgctctcccttgctggcccgcaccattcccgggctcaaaaaaataaattaaaaattaggcgggggggggggggggtggtgcgcgcctgtgttcccagctgctcaagagactgaggtaggaagatccttaagcccaggaggtcgaggctgcagtgagccatggtggcgccactgcactccagcctaggcaacagagccagacctcgtctctaaaagaattaaataaaattaaaaagtgtatgtctttaaaagataagggtgtttaggccaggcacggtggctcactccagtgatcccaaccctttgggaggccgaggcgggcaaatcacttgaggtcaggagttcgaggacagcctgggccaacatggtgaaaccctgtctctattaaaaacacaaaaattagccggaagtggtggtgcatgcctgtagtaccagctattcaggaggctgaggcaggagaattgcttgagcccaggaggtggaggttgcagtgagccgagatcgtgccactgcactccagcctgggcaacagagcaagagtctgtctaaaaaaaataagaaaaaagaaaaaagacaaaaaaaaagataagggtgtttagcagagtcagctagatggtggggatggagtataggaaggacaggcatgactgagtagagacaagataaagggttatggcctggtgcggtggcccacgcctgtaatcccagcactttgggaggccaaggcaggtggatcacgaggtcaggcattcaagaccagactggccaagatggtgaaaccccgtctctactaaaaatacaaaaattagctggccatggtggtgcgtgcctgtaaccccagctacttgggaggctgaggcagagaactgcttgaacctaggaggcggaggttgcagtgagccaagattgcgccactgcactccagcctaggtgacagagtgagactctgtctcaaaaaaaaaaaaaaaaaaaaggtaacaggttattagcagggtcgggaaatgaatgatggtaatctagactcttgatggttacaaagcagagataagtgatcatttaagcaatagagagaaggtggaattgatactttggtaagtcattcctttcctcacctagaatgttgaacacatattaccaatgtgctagtgactggctatgatgttttttgtttggttggtttttgttttgttttgtttttggagacagaatgttactctgtcacccaggctggagcatagtcatgtgatcacagctcactgcagccccaaattcctgggctcaagtgatccccccgcttcagcttctggagtagctgtgactacaggcatgccccaccatgccatcctaatttttgtagagatggggtctcagtatgttgctcaggctggtctcaaacttctgggctcaagggatcctcctgccttagcctcccaaagtgctgggattacagatgtgagccaacatgcccggccaatttagtgttttatttagtgcttttcatgtgctcagcactgttctgaggaattttcatgaaccatctcatctaatccttattgcaactgtatcagtcagctaatgctgcataacaaacaacctcaaaatcttagtgacttaaccccaggcagcttcctaactcatgtgtctgtgggttggttggcattggccgatcttagcaggggtcatgaagcacttaccatatgcctagcataggtactcttttttttttttttgagatggagtctcagtctgtcgcccaggcagtgcaatggcaccatcttggctcactgcaacctctgcctcccaggttcaagcgattcttctgcctcagcctcctgagcagctgggactacaggcctgcaccaccacacctggctaatttttgagtttttagtagagatggggtttcttcatgttggccaagatggtctcgaactcctggcctcaagtgacccgcccacctcaacctcccaaagtgctgggattacaggcatgagccaccgcacccagcctgaagtaggtactcttgtccttccatgttacaaacacagaaactgaagttcagaaaggctaagtcccttgtccaagtctcaccctcatttgtggcgcaatgaggagggacatccaggtttcagggaggcatgggagcaggttcagcctcctcagccccagtcctgaccccttacctcccctgcaggtggatggtgagcactactggctgccctgggcactgccagggggctggggttggccgccttggagggccaccatgccatggtgcacatggcctgtgggctgtatctcatgtacacctggggaagctcatggtgccttctgaattctaaggcgagctggcggggctccatgggtcctttggaggcaatgttggcctacttgacctgcctctggataccgtgtcctggtccaagggcctgatcactatccactgcccactgacccagcccaaccatggctttcatgtcagctgcccacatgacttgcccagatcttcaaagctcccaaactgtgtggcctcctgcatgtgccggatggcccctttaaccactgtgtggcccacatcaacaagcccttccttagtatatgcctgcaggatgcgtgtcatcccagtggccagcaccgtggtctctgtgacactctcacaggccatactgcagcagccaggagcctgggaaccctgtgatgccctggaggggccccaagcattgccataagtgctctggcttggtctggggtgcaggcagggcagactatgggttggctggaagagccccttcccctggtgggagtccaggaagaattcctagcataggtggaattggtggaggagaatgtgtgggaagaggatccaagggaaagggaactgcagctacaaaggtgtggaggtggggaaataccaatgggaagccaggctgactaggggca[131 bp omitted]gtaaaacagtgtctctactaaaaatacaaaaattagccgggtgtggtggcacacacctgtagtcccagctacttgagaggctgagggtggagaattgcttgaacctggaggtggaggttgcagtgaatggagatcacaccactgcactcgagcctgggagacagagggagactccatctcaaaaaaaaaaagaagaagaagaaaggaagaaggaagaagaaggaagaagggaaaagaaggaagaagaaggaagaaggaaaaagaaggaagaagaagaagacggaggaggagaaggactaggagaaggaggaggaaggaggaaggaggaagaaggaggaagaaggaggaagaaggaggaagaaggaggaagaaggaggaagaagaaggaagaagaagaaaagaaatttgagccctaggcatttatctttgccaactgcctgcagcacagacctgcccaccccaaggccattacagcatctgtgcacagacctatgatttggggtgtgtcctgcctgccaaccccgctcactgttcctcccgatgctatgagagctatgaacgtggcctcaccattgatggcacagactgtgtgtcccaggaccactgtggctgcttccacaatgaatgctaccttctggtgagagggatctccaggcctggaaggtgaggacaagtctcccaaacctcatcataagatgttccctgaatcaccagtatatcagtcagcattttcagttgtaaatgacagaaaatgatgccagctgtcttaaatacagacgagaatttgtctgcttttacttatctgtaaagatgaggccttcaggtctggctggttcaaggactcaaatgatgttgctaagaacttagtttctttccatctttcatcctcgccttttcctttttctgcgttagcttctatagtaattaggctccaggtccatatggtagaacaaaagctcaaaattacagtggcttaagctttttgtttgtttttagagagagggtctcactctgtcacccaggctggaatgcagtggcgtgatcatagctcactacagccttgacctcctggactcaagcaatcccgacacctcagcctcccaagtagctaggactacagttatgtgccaccatgcctggccaattttttttttttttttttttttttttttttttgtagagacaaggtcttgttgtgttgtcccggctggtcctgaactcctgggtgcaagcaatcctcccaacctcagcctcccaatgtgctaggattacaggcgtgagcaatacgctcagcctacagtggcttaaacttgatagaagcttaattatctctcacaggcagtccaagtataaccagtttgcttcctccaacacaggctccatctgtcacgtggctctgcctcccctgtggtattgccctcatctcttcctcaccgcagctacattcctgcaagttggaaggagaaaagagggcacaaagaggccaggcctcctccctttaaggacaaaacccagaaattgcacacatcacatccattcacttcccagtggccaaactttatggaagggccccatctggctgcaaagggggctggaagatgtatctttagctaagtggccatgtgtgcagctaaagattctaatttggccaagtgcggtggctcatgcctgtaattccagcactctgggaagccgaggtgggaggatcacttgagcctaggaatttgagaacaacctgggcaacatggtgaaaccttgtttttataagaaatacaaaaattagccaggcatggtggtgagcgcctatagttctaggccactgaggtgggaagatcacttgatcctgggaatttgaggcttcagtgagtcacaagcatgcccctgcactccagcctgggcaacagagcaagaccctatctcaaaaaaaaaaaaaaaaaaggaaaagacaaagaaaaaaggccaggcatggtggctcacacctgtaatcccagtactttgggaggccgaagcaggcggatcacttgaggtcaggagttctagactagcctggccaatatggcgaaaactcgtctctactaaaaatacaaaaattagccggatgtggtggcgcatccctgtagtcccagctactcagaaggccgaggcaggagaatcgcttgaacccgggaggcagaggttgcagtgaatggagatcacgccactgcactccagcctgggtgacagagcgagattccatatcaaaaaaaaaaatgctaattctaggaaagaaatggagaatgggtatctgagactgccacagcctcattttcaaactacccctctgcctgcgggaagtgatctcccactgctccaggttgatgatgtacagtctagcagtcccagtggggagacagcacttctttcttcacagtttcaacagaagtcccgggtctgattctcattgtcccagtggaggtcatttgcccatccctaaacaattacaggggtcaggggatgggatattctgatttgtctctaagtagccaggcctgggcatgtaacagagctgtagccagagccagagggcagggatattacccaggaaatcccctagaataagagtgggccagttccccaaagacaaactgagagactgtaaccagaaaaccattgacaggccctgggcaggaggcaatagtattccctttgaggttttgcagctccttgagtccactggaaagtaaagaaagtccccctaggctgattgacatagttgtcttggagattaagggtcatttgacaggaaaaagatagatgtttaaattccagagtacaagccagcatggtggctcatccctattatcccagctacttgggaggatgaggccggagttcaagaccaatctgggccacatagcaagaccctgtctctaaaaacaaaacaaaaaataaatatttaaaattccagagtgaagcctgggcaacacagcgagactctgtctctacaaaaaacaataaaagaagaattagccgggtgtggtgggatgttcacgtaatcctaaccactggacatgttgaggcgagaggattgcttgatcccaggagatcaaggctgtagtttcaccaatatggtgaaaccccgcctctactaaaaatacaaaaattagcccagtgtgctggcacatacctgtaattccagctactggggaggctgaggtagggagaatcacttgaacctagaggcagaagtttcaccatgtggatcaggctggtgtcgatctcccgacctcaggtggtccgcccgcctcggcctccaaaagtgctggaattacaggtgtgagccaccgttctaggacatgtatttttgatagatacatacacctgccaggcaggattcacagtggtttgtgattctcccctgactccaagactccaagcctaatccccgcccctgaccagcttctcctctctgaaggggaatggaccccccagctggttgccggcccaagtgtgcagagccgcggttgcgcgctgggtggaggggtcccccaagctccggtgctggtggggcccgaggatgctgtgtccttgcgggcctccctagcgctacgaggacacctccaggcggcccgcggggacaacaacggcattgcggcctaccacctaaagctcctgggaggacaacggggttgcagtctagtcgactgttcagggtgtcccggactccgggctttaacagtcggtaaggacccaaacaccgctgtccactgccccgactcccacccgcagagggcgcgaccaacccagctcctagagccacacgctgcctctgggggcttggcgcccacactctctctgcttgtcttcccctggcccgagaagcctgtccaaccggccgagagccatttccctacggggtctcgtccctctgcacgtgcccagggctgggaccccagacacagacctgccccggacgagggaacgcacggagcttcccaagatggtttgaatcagtaactgacggcaaaagcacgcttgtgcccggcgtctctcccagtgccccgtgcccttgggacccaaagtccgaaccggtagccgggcgcggtggctcacgcctggaatcccaacactttgggaggctgagaatcgtttgagcccaggagttcgagccattctgggcaacatagggagacccatctctgcaaataataataataataaataaataaataaataaataaataaataaataaatagcgggcgcggttgcgcgcgtctgtggttccagctactaggggagttgaggtgggaggatcgcttgggcccaggagttcgaggctgcagtgagccaagatcgcgccactgcactccagcctgggcgacagcgagaccccgtcacacacaaaaaaacccctagcttcctcttctcccagaatgcaggagttaggtgaggaccctctgttccctccaacccaagacctaggagtccgaacacataacgccctccaggcggtgccaggatccccagaactgctgtcccctcaagaacacacgtcccctacgtgggaggccgcgaccagcgactccgcccacttctcccagccggctgttacgtaactgcaacgacagccagtcagacgcggcagcgccggatggcgggaggcgggagttggaggccaagggaagcgctgggcggaagtggctgtggctttgccctttggcctttgctggctgtgtggcggctccgcggttcgcaggtcgttcgctgagcgtctctgcttagccgcggtcatgagccggcacagccggctgcagaggcaggttctgagcctgtaccgcgatctgctgcgcgccgggcgtgggaagccgggcgccgaggcgcgagtgcgggcagagttccggcagcatgcgggcctgccgcggtccgacgtgctgcgcatcgagtacctgtaccgccgcgggcggcgccagctgcagctgctacgctcgggccacgccaccgccatgggcgccttcgtacgcccgcgggccccgaccggggagcctggcggcgtgggttgccagcctgacgacggcgacagtccaaggaacccccacgacagcacgggggcaccggagacccgccccgacggacggtgacaggcgaagagccgaactcgctcgatggcgtggtggagccaggaggctcgcctgactgcatggggggactggggaacccgcctaaggtgagaggtcttaagagactagcttgacgaattggggatgtcagagactcctccttggcgacgcagggggcctagagagccccgtgatggacggcaagggaggcccgccttttccgatgcttggagacaggtcggtgctcctcccccatgagggcttggggcggcctgggacgctggcgggctggacagtgtcaagccaagagctacttgcccgaaggtacggggagccaggacgacccccggtggacagggagagcctgagacgcccttctcttgacccctgagaacatacccacttctggctcctcaaggagtctcccctctcctgtatttaactctgagaagtgcagactttttgctgagaacgttttgggaaggtgccctgatgagcggtgagaagcccggaatccccttctggaaaactttcccccattaattgtgacaagccaggaccatgaggaaggggtaggggtctatcaccctggttgatcaactgaagacccccaaaggcccctacttgatggttttgaggggcaacattgactcatttgccccttccctctcggaatgttggacaaagggaataaaattggggatatgtctacttccctgttggtggtcttaaagcttttatatatttcaggatttttgaaacacccccagcccccctgccaccacacacacacgcacacagacacctggaagggaccatctgggaggtgataggtgtggggatctgactccttccggagccctgtagactggcacattgattgaagcggcatagttttctcccctgggcagatctgtggagggggctcatcctggcttaacccccaaagataccccagttggctccctaatggagggcaagtgatttaacatctttgtgtggaagaggaaatggtggagctgagaactggctcggagcccctgaggcagtagtgagggtctcagacctggaaatttctcaaacctggctgaagggtccagcctcagctacagtgaacgacaaggccctggggcaggagaggggagatgaaccccatagatcacagatatactccctccggtgtccccatatgggcctgccctagacattctgtggagggatgcattttgcatcgctgagctatatttgcacccatatcagttaaataagtggaaatgagttcttgtggatgtagctgtgggtaggaggaccacaggtaaggagcatagacctcagaccaaagggaggatggacggaagagaaacagtcactgccctaatcccggtgggggagccacattcccaaatggttataaagtggaattgcagtttgaagaattaattgccgggataggcttctaggcaagaagaccaaggctgggcgcagtggctcactcctgtaatcccagcacttttggaggccaagatgggcggatcacgaggtcaggagttccagaccagcctggccaatatggtgaaaccccgtctctactaaaaatacaaaaattagccaggcgtggtggtgggcacctgtaatcccagctactcaggaggctaaggcaggagaatcgcttgaaccctggaggcagaggttgcaatgagccaagatcacgccactgcactccagcctgggcgacagagcgaaactacgtctcaaaaaaaaaaaaagaccagtgtggggaaaggcctggagggggcaaagggaagaaatgcagggtctcaggatctcagctggggcccggagtgccccaggcacaaggctgtgggtttacttgattgtggcttctacttctgctttgtctcaggtttgtcctcaccatgggacttcagccacctcattcatctctctcagcctcaatttcttccatcagggtgatcatgttagtcatctcctggctccatctcaaaagccaaagaccagtggggtcctactcatccagccccccaattacatcttcagctgcatctcctgccaccccctcactcctggctccatgatcttgagccctgacaagccccaggattggagctcctggcagggctgcaggcagggatcgagttttcaatggggtctggcatcctgggtcaggagagaagtcacattaacctgggtgttaacagatgaatgagattttcccggtagagaggatggaggaatgcctgatttgagggaggagctgtgcagatgaatagtggctaagagcacggacccgggaatgggaaggcagggtttgaatcccagctcccatacttactgattatgtgatcacaggcgagtgatttaactttttttttttttttttgagacagggtctctgtcacccaggctggagtacagtggcacagctcactgcagcctcgacttcccgggctcaagtgatccttccacttcagccttctgagtagctgggactacaggcgtgcaccaccacacccagataatatttttattgtttattttattttatttatttatttttgagacagagttttgctcttgttgcccaggctggagtgcaatggtgcgctcagctcaccacaacctccgcttcccaggttcaagccattctcctgcctcagcctcctgattacctgggattacaggcatatgccaccatgcctggctaatttttgtatttttagttaagatggggtttcaccatgttgaccaggctggtcttgaactcctgacctcaggtgatctgtccacctcggcttcccagagtgctgggattacaggtgtgagccagcgtgcctggcctattctttatttttcggagacagggtctcactgtgttgcccaggctggtctcaaactcttgagctgaagcggtcctcccacctcagcctcccaaagtgctgagatcacagtcatgagccaccatgcccagcctgatttaacctttttgcctgaatgcccttatcagtgaaatgggcttaataagagcctccctgatgtggccattatgatggtacagtgaattaaatgcctgttgtgaggccaggcgcagtggctcacgcctataatcccagcactttgggaggctgaggtgggcagatcacctgaggtcaggagttcaagaccagcctgaccagcatggagaaaccctgtctctactaaaaaatataaaattagccaggcatagtggtacatgcctgtaagcccagctactcaggaggctgaggcaggagaattgcttgaacccgggaggcagaggttgcggtgagccaagatcgtgccattgtactccagtctgggcaacgagagtgagactccatctcaaaaaaaaaaacaaaccctgttgtgacagcagatgatgaggcctgacccccacccatggccctcctgccctcttgggttcacttgcaactgtagaagcaggttctcaggaggctgcagcctcctcccctgagcccctgcatctctgttgctctgcctgagggcttcctgggagtcctggaaggtgggttaatgtgctcagaggcaaccctcagcctgtagggggcagcagtcactggatgagcgccctggcccacctctcatctggtgggacaacatgtgttctgcagggttcctcaggggcacccatggaatggagccccagttgcccacagtggtgtccactccatgagcaccttttttggcttttcccctgccctgtctcttccccactcccgcttcctgggatcacatcccagataaatcatcacccgagtccttggctccaaggatgcttatgtgtcaagcatggaacagtgcccagttctctgctgatcctctgtgtgcatctgctgctctgttttttgtttgtttttgagacagagtctcactctgttgcccaggctggagtgcagtggcgcaatcttggctcactgcaacctccgcttcccaggttcaagcactcctcctgcctcagccgccccccgcccccaaccccgctcgccacgagtagctgggattataggtacctgccaccatacccggctattttgttttgttttgttttgtatttttagtagacacggggtttcaccatgttggccaggctggtctcaaactcttgaagtgatctgcccaccccggcctcccagagtgctgggattatatgtgtgaagcaccgcgcctgggctgctgttctgtattttactctgctaaggcacagggtcaatgtttctcaatcccttgacccatctgttaaacaagaaatcccctgatctaagaaaatggctataaaagacatacagggattagagtaatttagactacagagtgagttaaaaatagaactgggttgttaaattttctgattttgataactactagaattgtgtgagaaaatggccttgttcttaagacatacacactgaagaatgtaggagtaaaaaggcctcgtgtctgcaacttactctcaaatggttccaaaacatatgcactgatataaatatattagcaagggtatggatggtaaatcacaaggagcaaagtgttaaccactttgaatctgggtaagggcatatgggagtttgttctagttttaaaaggtttcccaacacttggggaggttgaggtgggccgatcacttaagcccaggagtttgagaccagcctgggcaacacagggcttgagctgccatgctcggcctaaattttaaaattgaagtattttaaatgtaaatgtaatgtgaaagtattttgaatgtaaaatattttttgttacacaacttcattgttttagtaggactgtattgcattttacctgttaaaaatttggcatctgaattaagatgtgctgtaagtgtgaaatacacactagatttcaaagacttagtaagaaaaacagattgtaaaagatctcattatttttatattgactacatattgaagtgataatattttagacatgtcaggttaaatagaatataagttaaattattaaaattaatccatttttactgttttaatgtgactgctagaaaatttgtaactacatctgtggctcacattctattcttttttttcttttttctttttttgagacagtctcattctgtcacccaggctggagtgcagtggcgtgatcttggctcactgcaacctctgcctcctgggttgaagtgatcttcctgccttagcctcccgagtagctaagattaacaggcacctgccaccatgcccagctaatttttgtatctttagtagagacggagtttcatcatg[131 bp omitted]gagttcccatggcctgtttcctcactacaatctgctctcatggcaaaattttaacatagtggctccattctactgactccctgatgccttcttcaaccacattgtttgagttgtgcccccttcctcttgctcactttttctcctcagcacttaccaccctgtgacccactacaatttcacttatttcttttagttattgtcaatttccccaagtagaatatcagctccagaggcatcgtcttgttcactgtcgtgtctctgctccttgaccaggacctgacacatagcagacagtcaatatttgttaaatgaacgaatgacacagatatgctccattaccgagcctgttgggtcaatattgccaagactgcaccccctatttgctggtgatctcagggggaccatgcctctttggttgatgccagagtctcagcctggcctttgaaacaggacaaatccggtttgcatcctgacttttccctgaacctggagtctctcccagaatctgcagcttcccccaccccatcagtgtctgttcccctcttctagtagcaacaacttgatactctttggagacccacgcttctgccattttcagtccacatggtttaggtggggctgaccgcagcccccagcaaaggtggagcatgtgacggaagccagaggagccaaccttgggactttggttggaactacaaaggaacagtgactctactattggctgctaaattggtggggtgtgtgtcacagtggagggaggcttagcatgactgactccattttgcccctgacaccctgcagtaacatcctttaggttaaaagcttctgcttagttttgtgtgtagatcagctaattacaggaggaatttagtttatagctcaattttagaaaaaatagcagtccctttcccaaaactaaccaccccaccaagagatcaggaaactgtacacacaagtaacaatgttatactagagatttacaagaatattgtgacctgacctacatcatcaaagaagttttcttctggactcttgctggcgaccagatgtctgcagtcattggtcacctaacctcaacccccttcccttagcataaaaagaaacctaaaatttatactaagttgagatggttctttttttttttttttgagacagagtctcactctgtcacccaggctggagtgcagtggcgcaatcttggctcactgcaagctccgcctcccgggctcacgccattctcctgcctcagcctcccaagtagctgggactacaggtgcccgccaccacgcccggctaattttttgtatttttcatagagacgaggtttcaccgtgttagccaggatggtctcaatctcctgaccgcatgatccgcccacctcagcctcctaaagtgctgggattacaggcgtgagtcaccgcgcccggccgagatggttctttaggacactagtctgccatcttcttggtttgctgtctctccaaatgaagttgcttgctttttttttttgctttttttttttttttttttttgagacggagtcttgctctcccccaggctggagtgcagtgacacgatctcggctcactgtaccctccacctcccaggttcaaaagatttgtaaaaatacaaacgttagccaggtgtggtggcgcatgcctgtggtactagctacttgggaggctgaggccagagaatcaattgaacccaggaggcagaggttgcagtgagccgagatcgtgccactgcactcaagcctgggcaacagcgagaccctgtctcaaaaaaaaaaaaaaaactagcctggcatagtggcacacgcctataatcccagctactctggagtgtaaggcaggagaatcgcttgaatcctggaggcagagtttgcagtgagctgagattgtgccattgcactccagcctagggaagagtgagactctatctcaaaaaaaaaaaaagccacaacttctttgtccctagggtacaaccagcaatgggatgacaccccaggtgcccagtgcagcaaccagtaactcacccagtattggctttctcccttcctgagctcacgtcctggctcccctgccacgcctaaataaagaactggtgcttgactctttgtgtcagggtctggggcagccccacccaagatgggctgatgcagttctgtattctgttctcaaggcaaaagggtccatccagacatatccaggccacatcctagattccgggtatgaaggcacctagtatcttcacacatcctttgacagtgaccatttattacacacatcagactgggggaagaccattgacatagctgagcaccaggtagggtgtcctgggtattcgggcatgagagcagcaggggcctcctgacgcgggcaggagaaacatggcacccaccaggaggaggaagaggaggaagaggataaggaggaaggtcagaggctgcctggatgcaggatcgggggccctgtgaagggaaatgcagtgttaaacatacaggtgggctgctgctaggagctctgtcccccacaccctagtcccatctctcaggcacctcaccctggattcccctccagcctcacatcctggagatgaggagatgcttgcctcttcttgtcctaaggagggagagcagccagcagcagaatggatagaaatgatgctttatttgtttatttattttgagacggagtctcactcttggcacccacgctggactgcaatggctcaatctcagctcactgcaacctcagcctcccgggttcaagcaattctcctgcctcagcctcccgagcagctgggactacaggtgccaccatgcccagctcatttttgtatttttagtagagatggagtttcaccatgttggccaggctggtcccaaactcctgacctcaagtgatccgcccacctcagcctcccaaactgctgggattacaggcatgagccaccacacctggccgacacattattttttgagacagggtctcagtcacccaggctggagtgcagtttcacaatcacgactcatggcagccccaacctcctgggctcaggtgatcctcttacctcagcctccctaatagctgggaccacaggcacatgccactgcaaccatttacttttgtttaatgatttgtagagatggggggagggggcaggtctcaccatgttgctcaggctggtcttgaactcctggccttaagcaatcctcctgccttgacctcccaaagtgttgggatcacaggcgtgaaccacggtgcccagccacaagtgacactttgtgtcacctttaccctactacgatagacctacaaagctggtcttatttcttctcctttcctggcacctccttatccccaggaccccacacagacttggaatatctccaagtgtagtggatgtctggttgtgtctgtcctttatccaatacaatccccctttttctgataacagtgccttaattggaggtgggcggctgtcatgccttccactcccagaccttcaggttcaagtgaagctgacagccacctccccaacttccatgattggtgtgacccagacctggccaatctgagcactctggtttattcaaggtgcagcccatgaccccatccggtaagtgggagtcagccctgggactttggcagctgtcagtagggtcggaggcatgctccttcccctggggtgggtaaaccagtgggagtggcagtgtagccactggagcacccattttgctaagaaggaagccaccttggggacttagagcccaagaaagggagggactgagccctgatgttatttctttctttcttttttttttttttttttttttttttgttgagatggggtctcactatgttgctcagactggagtgcagtggtgggatctcggctcaccgcaacctccgcctcccgggctcaagcgattctcctcctgagtagctgggattacaggcatgcgccaccacacctggctaatttttgtagttttagtagagacggggtttcac[140 bp omitted]ctggacctttccattactttttttttttttaatagcattccctttcttgtgccttttgatttcttgggtttctgtcacttgccatcaagattcctgagtgctacacctggttgagaactggctcacctgaggcttccggagcagggagtgtctttggtgacgtgctaagcgtttctggtggccgaggccagactccagcatgtcctgtcgggagtgagaggtgtctgcttcctggagaaccagcaacaaagaaaaacgtggttgggggagggccaggatagggatgtcatagagatgagattctgggggagcagagagatctcacaggacagacaaaggcagagccaaagaaaccaagagaggagagaattatttattcattcattcaataaatgtgtaatgagtttctgttacaagccaggaactgttctaggagctgaggacacagtggggatggaaataggcaaattcctggcctccgtggagcttatatttgacaggagagagaccataaattaataagtaaatgaggcctggtacagtggcttatgcctgtaatcccagcactttgggaggccaaggcaggcggatcacctgaggtcaggcgttcgagactagcctggccaacatgatgaaaccccatctctactaaaaatacaaaaattagccaggaatggtggtgcacacctgtaatcccagctactcgggaggccgaggtaggagaatctcttgaacctgggaggcagagtttgcagtgagccaggattgcaccactacactccagcctgggtgacagagtgagactccatctcaaaaaataaataaaaatttttaaaaataagtaaatgtacaaagtcaagctgtggtgagtgctgttaggaaataaagtaagaagataggagtgctcatgtttggaggtcacgacaggcctccctgaagaggtggcacttcaggagagactgggacagtcaggaggtgagtggggcatcatctgggggcctcaggataggagtgaatttgagatggggcttgaggatgtagacagagacagacgagagagagaaacagtgagatagaaggagacaccgagagacagagatagagggggagacagagccactgacacctccttggaagggcaggatcttgctagaaggtgcgcagagatgtccccagggtgcctggcagaaggtccctcaagggggtctgctctcacctcaaggccttgtcccctgccctggggccccctctggccacacagctcacagggcactcctagtgtccgggctgtcttttgtcccaagggcccaaggcccccaatgtcccccgccggatcccactccaactctgtggaagtggggaggctactgggtgcccagggcccccagaccccaccaggtcctggccagtccgagtctccctcgacctccaagtcctggtccagcgtgttggcctcctcgaacacctgggtcaaaggacagaggtcatggaggctatgaggttggggcctgggttgggtggggggtatcaagatgggccctaccaggctgtagctgaccagctgggcctgcagctgccagagccgccggaagatggagtctcggtaagctcccagggcccgcaggatctgctccagggctgcccaggccctgggctcactccgctgtgccagcccctcaccaaacgctagcagcgcctccacacgctcagctgcccctcgtaggtccacctggagggcctggggacatatggacatcaccccacgcacacaccagggacccaaaacctggagttacccccctcccccatttcctatccaaaggcctggaacatgcactcaacccatttcccatcccggaaagctggcacccactgctggggccgtgcccacccccacatcctggcctctcctgcctacctgcagctgcaccatcccactctgggccaatgcccagtgccccaggccttgctccaggtcctgcagccggcggcccagccccagcaggcacaggtgcaggctgttctgctcagcctctagtacctccaggccagaaatggggtgctggggaacacaggagccaggtcagggccagtgggccaatcaagatatcacccctgctcccatccccacccctcttctgtaagcttctggaaacttctctgtggcacagtccatctccgggtctgtctgcaccaggatggctcccactgggggggccttcccagtggagccaggcctgaggacagatatctagttcaaggtctccaggttttcaaagctcctggaaacttggatgtgtgaggcctggggggtctggacagggagcggggctgggtaccccccaagaagaatggggctacaccaggagcaatgatgaaatgcttctcagccgggcgcagtggttcacatctgtaatcccagcactttgggaggccgaggcccgaggatcacttgagcccaggagttcaagaccagcctgggcaacatggtgagacatcatctctacttttttttttttaataaaaaagaaatatggctggacacggtgacgcacgcctgtaatcccagcacttcgggaggctgaggtgggtggatcacctgaggtcgggagttcgagactagcctggccaacaagtcgaaaacccatctctactaaaaatacaaaaaattagccaggtatggtggcatgtgcctgtaatcccagctactcgggtggctgaggcaggagaatcactgggacctgggaggcggaggttgcagtgagcagagatctcaccactgcattccagcctaggtgacagagagactccatctcaaaaaaaaaaagaaagaaagaaatacgtctccccagttggtcagatattgaaacacttttccagaaggtccctccccctacagacacccaacacctttccagaatcatcacccggtcctcagtatggaggccagactccaggggacagagaggaggtggggctggcacaaggggtctgggtcacctcagctcacctcacagtgtttgcccccagctgggtcctcgtaggaagagggtgttgaccatctcggggggtgagcggcaggctcattgccccttggcccaccctggaagtgctcaggagggcccaaggagtcctgtcccagggtctgggcctgctctgggctaggaggcagggggcggtgactgggtgagtctcgacacctcacttttcagcctaccgtcaccccaaccctggtggcctctcctatgtccccaggcgatcacagccatggcacctcctaccctcacatggcccctgccaccacgcctacccttttgggaacaagcttccaaagccccggcccccacctcgtgctctcctctccggacgcggggcagacggtgcatccaacaatgtccgcctctctaggtgctcccggtgggtggttgaggggctctgagccaagtctagggcccagaggcagggacagggccatggctgggggcctggggacacaaagtcaggtgagggcagccagtaagacctcttccctagacaagggtgtcccagagctcctccgctggagtcacccgggcctgaggctgcaggagaggcccaggacaggtctggctccgccccttccaagaggaacctggacccggccatttgatgcccagctcaggtgacagaagagtcacttaactccttcctccctagcaggccagtagctaaatctcccagcatcactccacgccatccaagagggttccagatagaacccctgcgccacctcctcaagagccctggattctgccccactgggaacccagaaatcggacctccagggcctaccccattcatttaagaccctagatgccgctcccctcaggaaaccaagcatctggcccctaaaaaataaaaatataaaaccaaggaaagatttttttgtttatttggtatggggtcttctgtagctcacacaaaattattgggaaaataaataacccaggggagccccctttgcccacggttcctaggtcgcggagtcacagcagccccaaaggggcaggaacctgggaatccgaggggtcccggccctggcggtcacttgcccagcaggaggccggcgcgcagcacgcggggcacgcggcggatggtcagcgagacccgggtgccgcgcaccaggcaggctcccggccgcgccgacgggcaggctgccgcattgggcggcgaggaggcggcgtccagcgcgtctacgcgggcggcggcgatgccgtggagaagacgcgtgtaggcggggccgcggagcaccagcaggctgcgcggttccagcagtagcgaggtggtgggccggggcggaggccgaggctgcagggcgggttgagggtcagcagggctcaagaagtcggggggtgggggtgggcgagaggtcggtagcctccggggatcagctagtccccaggggcaaaagctgaagagcaagtgtgctcacaatgatggaggctttggtggttcaggagtgaaaattgctggggcctgggctggggctgctggaaagggagggcgagggctctgccgtccctcgggagggggcaggatctaggtggcagatgggggcgtcaaagggtcagcggccggtgggagctgcagctgggatctcaaaggggctgaggctggggctgggacccaggaataggcagtccccaggaaatacaggcagagctgggctgagagagcatggctgaagccaggaccaggtgaggagagagtgaggcagaggttagaggcagtgggggttcccaaggacatcaggacattagaggacaaccgcacagctgagggagtgtcagagcatccaggagcatgcagggctcgagggcaagcctcaaggagtgggtcggcgtgttcaggggcgtttctgtgaacactggggtgctagaaatgcatcactcagagaaattgtgtcaaggggtcaaggagaatctgggggtgtcctgcaccccaaatcacattcctggagtagcaggacgtctggggcaccctgagcaggggcagatagagcatctgggaggaggtgaggccccccgagttaatggcggtggggtatctaaggatatcagtgtctgctggggagtcaggggtatccattcagcaggttggggcatcggggagcctgtgaaaatcatggcatgtgggacagacaccctgtaagcagatgggttgggtgtctgggaggaagtgggtacaccccatgaggggacaagggaaggtatctgggagagtgccaggagtaccccgaaggcatgtgggaccaggtcatcttggaggatgtgcgaggttgaagtgcctacaagcagctggggcagtgtctgggggcccacctgttctgtagggtcatcgtcctctggccgccgcggctcgtagaagtccagcacggtgtgggagcccaggctgatggtgctgacagtcgggtagtacagtggtccgtcctcgtggggctagggagtgggcaccagggctgggcagggcaggagtccacaacccccaccctctgggtcaaaggggggcttcccaagccagggacagggaggtgaatgcctgtttgggagatgtggctgcctaatgagtgagggtgggtacagagtcccctgccccagcacagctcagaagtctgagtggggggacacgggccgagggtgtgtggttaccatgatgccctccccaggcagatactggttcacgaggacatggttagctgggaggcctccaaagaggctgaggtttgacactttgtccacgtagcgctggagccatgggggcagccgctcaggaaccatccctcggggatgaggaagcccacctggggaaggcaatggggtcctgagggcccccctatagcaatagatcccccattagggattccacagtggctggaagcaccctgatcctctcagggacccctgaccgtttggagatagccactgggtccttcagaggtttcctcacttctccagaccacaggtccctttcagatactcccaactcatcaggaaatccctaatccctcaggacctccactgaccccttcagaatcctcctggctcttggggccccttgagctgtcagggaccctctgatgtcttaagtctattggacctgagtcccctgccccagcctacatcccagaatcactcctgcccccagccagggatacttaccccagttctgtaactttctcccagagagctgggtccactttggctttggggcattaaaaacctaagaggtgggaagggggtcactcctttctcaggatcacccctctatgatcctcccacctagaccaacataggggcctttacctccgggatggaaatgggtcatctgtgtctgtgggaccattccctggggcggtgggttcctaggattttgtggtttgccttttttcctgggaacgcctttggccccaaagcccacctgtgtctaccaggatttaggaatcagggctgcacaaccgtggtctgagagttgtgggtctcacaatctactcagagttctggggctggacagggctctttcagcccagcaaatagtctgcattctaatttcctgattccgtgccaaacctggttgctcatgcctgtaatcccagcactttgggaggccgaggcgggcagatcacttgaggtcaggagctcgagaccagcctggccaacatggggaaaccccgtctctactaaaaatacaaaacttagctgggcatggtggcatgcacctgtaatcccagctacttgggaggatgagacaggagaatcgcttgaacctgggaggcggtgtggtgtcacacgcctgcaatccaagctactcaggagactgaaacacaagaatcagttgaacccaggaggcggaggctacagtgaaccgagatcacgccactgcagtccagcctgggcgacagagcaagattgtctcaaaaaacaaacaaacaaaaattcctgattcctgggctctctgaggacagtttgagttctgcaaccgacttgttcctattgcctgggggagggagtatgcaaagctgggctatctcagcacagcaaagaaagtactttgaaaatcttccactgccaagatcctaatgatctagaatgggctatctcagtccaacaagtctagctctagttgataatctactcattcccttcatggttatggagctgtactgggctatttcagcccaggaattctataatatgtagatttttcaatgccaagaacgcaaaggtctggaatgggctatctcagcaaaaaagtctgtgttctgtagctaattttttcctggactcaagatcagtgggttactccaacacagggaagatctgtgctctgtaacttaggcactggggctgcaaagggcaggaactctgagctttgaaaattcttctttccccaaaccttaagaacagaatgcagactgggccatctcagcgtagatggtctgtatttggtaaccttattgtgctctgggtctatgctgggctattttagcacaggaaagagtttactgggctatctcagcacagaaatctgaatacaaaattctttactccccagtctcaatgatctgaactgggctatctcagcctatgtttataaccccctattctctaagctagcaggattgggctatctcagtagagggagtatgagctctgtaacttccttgttccttctgtcggggtcttcactgcagccttgggggctctcatacagaggatggacattggggaggaatatgggaagagtgggaaaacagaccagtagggcactgaggtcacctgtcgaagcaaatactcctcctcttctttggagatgaagtcagggacatagtagattacaggtggtgcctaggatagaaagaccccctgaaggtgtggcccttcaacccacacagaggacatatcatcacagagcaacccctatgcctggagacaggctcaggatgtcctcagacaggtcagggtctaaagtcaagggaccagtgccattccagaatggactctgacagtaagaatgaatttggtggaagggggcagtcccaacccaagaactcaggaatcagcctgcctccttcaccctctgcaccctgagttctgacaacctgctccactctgaacggttccagggctgggactctggcgtcctgctcctccatcaacaccaactccttgcacccaatcctgtagggaggggaggacatactgaagtcactaggcctcccgccctaacaccatgatgcagcattccaccccatcacaggccaggcctcacctcagccctcttctgaaacgcacttggtctctaaaatctgagtcttcagcatcttacaagccacacagagagcccctacgttccatgcccggacacaatgagccccaagaataatcccccattactctgtccactaagggcccatccaactacacatatgccttctcaatcctcccacagagaacattctctggccccacacacagggagcctttctcaaaagctctacacatagcccccagggctgcactccagagcccctttaaacaccttgagaccccgcttcagacctgcaactgtgagcccggctatcaacactcagcgacccccgccccccaccgaatcccattctgtgcactcctgtgaccccaatctgagcctcctcagacatgtccaccctcagcctcctcggatccccccatttggacgcccctcggatttcccctcctgagcgccccttcactccagcaccctgagatctttagctctgaggctgactcccaaatcttcttccctccctgaaccattcagatccccgactccgagccttttaggactccaagctctgagcctcctcggactcctactctgggctcccccggatccccactttcagccctattgacatccatctctacccccagcactccccaaaactgaccgtccaccagcgtcccctccaatttccaaattcaacatccccatccccctcccagccatttccgccccacattacagacgcagagtccgcaggccaatgggagctcccagaggcttcaagggcccgccttccacccaatcggcgctctcactcagtattcgcccgcccccttcatgctcgcctaaggataggccgcgcctcctggcctctgagccattggcaggagggcgtgggcggggcatcgtcgtctggcactggccactcagaacttaggaactgaacctggccattggcggagtggaccccgatgggtgggacgggggcggcagccgtgacagccgcgggaagacatgagaggctgctagaaggacttcccgcggccagcgccatcacctgcccacgccgcagggaggtgagactgaaggaagcacttcctttcccgtcttctcccagcaagggaaacccccaatgacccgacacagagaggccatagaaacgtctttattgaagaggacaggagtcatgctgagtttggggacatgcagtgaaggggcagtcgtgagctgtccttggtggtcggggccccaggtccgccctggaccccctgggccttcaggttctccctcgagctgttggtctggcccaggtgctgtggggtcctttgaggccagtgactagaacgtagattgaaatcggggttccaggatttgagatcccctcagggccttggggccttccatttattagagatggaggctttaggatttggggttcccttagggctggggctcttggaatttggtgtcttgaaacccatggactcggggcattgaaattctccagtttccagggatgggaattcctgtgtggggtttcctggtgcctgtgaatagggcttgaggtgtctgggagcctggaatgcatatcctgactgcagtctcctccataccaggcacaaggacctcatgattgggtttcctggggacttgggattggattttcaaatttgggattccctggggatttgggattccatgatttgggggtcctaggagttacggcattggggtcttctaggggctgtaggacttgagggcacaggggagtttgggacgtgtgtactctagggtttgggatccccagagtcctagaatggggcctccaaattttggggtcccccaaagggggaagtcgttacttaaaaaatagagaattttctgggagtctggccagcacaggagctgtgggccatgtggggtgggcttcatacaaggcactgggggtttcttgagggtgcagagggtaggaagacttggggggtcctgtaattagcacttccaggactgttttggtgtctgtaaattaggggtgacagtgggctggttatggtgggtttcttcttgagggataagaacaagggtctttgttaatgaaggaagtctctgattgaggggttggaatctaagggcttcagggtgaccatggggtcacgacatcttgagaggactgatgttaaatggggaacaatgacatgaatgtctgttactcttttgctttgggggtgtgacctatgtttatttcaagaggacttaaggggcagtgtttgttaatggggaggtttctgatccagggttgggtgattcaagaatgttctgttgtaatgcattatgtggagagggtcaccatcatttggggtgatatggaaatctgttaatctgggaatctgctctgaggggttggggatagggactagcctgaaggtgctactcagggaatctctttctgggtgacatggggtctgtatttgggggttattatgggagtatctgttaataatggggcctcaatgatcgagggctggctaacaggggtctctactctggatgtgttactgggaatctctatctcagggtgactcagggctcctcgggtgtcaggagatgctagtggggactctgtctctttgtcaggtgtccagggcctctaagactgcatctccgccctcagcatccaggggaaccagcagcagaacagcaacctggaaaggaggatgacagggtcacgcccttaggcaggcagcggggacatctgcacccatcacccccagcctttcccccagtgtttgctatcaggcctttctggattctgcctctacctctctggctgtggtttgtttgtttgtttgttttctgagatggagtctcactctgtcacccaggctggagtgccatggcacgatctcggctcactgcaacctctgcctcccaggttcaagcaattctcctgtctcagcctcccgagtagctgggactacaggtgtatgccattgtgtccggctaacttttgtgtttttggtagagacggggtttcaccatgttggccaggctggtcttgaactcctgacctcaggtgatccgcctgccttggcctcccaaagtgctgggattaaaggcatgagccaccccgcccggtctctagctgttgttctgaggctcgtatggagtgaagggtgttctgcttcctttaccggcccacccgaaagtggaattcactagaattcagtgcggggccctacaccctaaagactgtttctgggtatgcttacaagtcacaagttttcctaacctctctttccagccctgaccagagctccagacctctgggtccaactgccttatggatccctctccctgaatgtcacataggagaggggacaggggttggccacacacctggaaatggagttctctgatgcaatgtcctttggggtccggactgtggtgaaggtgcgtttgggctgcgtcactgaagaggagggcaggatgtcaagtgaggggatgacagaccacctgtgtcctcaatacccatccagaccccttctcattaatacctccccatgtctccagtccccacctggatcctacattcccaatacccatctgggcctcttgtccataattcccaccatgtcccccagtgactatccctgtccccagtatctgctcaacctcatgtccccgaagagccttgttgctaatttcctcatatcctctagcacctatctttttgtggaccttgtctcatcattttcctggaccctgtgtccccaattaaataccagagactgtcaccagtatatacctgagaacccatgacccttcctcccatccccaaacgtacactcctcccaacatatcatcccctaactcacttgtcacttgatgcacttttttggctccaacgctgtccccgggggaatcagtggatccgccaatcctgaggagacacggggagggggagaagtcagagccacaaaaggccagggtctgactgagagctgggccccagggatctatgaggaaagggctgggggctcgggggtgtccacactgtcctgctggtctgggaggaggaggccatctgaggggggatcagggctccaggtggtgccctgggtttgggctggaagtttgggctcacctctgaatacgggatgctggtgcgaagaccccatgcctcggggggcaagtgaagtaccggacaccgaagacagagccatcatgcttgcctgtgggctggtccagctcaatgccataccagtaacctgcagcacgagggtgtcaggatttctcaaggccctgcctgcctcccggcccagagtccccatcctcacctggggcaaagtctgtcttcccgtagaagcgcacgatcccctgcttctggcccgcgacaaggacctggtctccaacctcagccttggccccgtcacgctgctgcaagctgcccagagatggggatgatggggtcttcttcttgcctaagggtagaaggtgtaggaggtgggtagtggggctgaggccagctttgggaacctcgtgccacctggaaaaccccaaggtagaaaaccctgttcttcgtttgaagtgaaactgaatcccagatgccagagaattaggaaggggctttaggcctgaagggaaactgagtcagagaacctgaagaaccccaaaatcctttctcaaagctgaggatatgttggataaggaaaagctgagtcagaagtcaggaacccagaaactgtccttttaaaatgaagggaaaattgggtccgagagtaaatcaggccatgtgcagtggcgcaggcctgtaatcccaacattttgagaggccgaggcgggcagatcacttgaggtcaggagtttgagaccagcctggccaacatggcaaaaccctgtctctacagaaaaaaatacaaacattagccagatgtggtggtgggcacctgtaatcccagctactcgggaggctgaggcacgagaattgcttgaacccgggaggcggaggttgcggtgagccaagatcgtgccaccacgctccagcctgggcaacaaggcgagactcttgactcaaaaaaaaaaaaaaaaaaaagtagatcaaatgacaaaagacaggatctccaaggattcttccctaaaactgggggagacctttgggtctgagaggaaactaagtcacagagggcagggaacccacaggtccttctaagaactagggggtgccagtactgagccaaaggggaaactgagtcacagaagtcaggaactcagagcttgtcttccaaaactggagtttgggcctgaggagaaactgagtcacagaagctgagctacccacacaacatccccaaactggctcttcccaccacagggatcccctctctgacctttgtgttccctgcggcctttgccggtgacacgggagaagtccatccggggggtccggggtgtggaggtgacagaggaggggggtgcgtccactgccttggagatcttggacacggaggcaaagagacctaggggtacagaatccgagcctggtgttgtccaagcctctgccctcggcccccatcctccatcccctatttcccagtcagcagcatcagaactgccgagtggacacccagccacacccctcttgggcccgaggtcggactaaccctgcttgggagggcagatgaagtaccgaacgcccccaacgctgccatcgttcttgccctcaggttcgtccagctccacgcccacccactggccgctggcaaactccgtggtcccacagaaccgcagtgtgcccgtctggggagagaagggaggcgatggctaaggaaggaatgctgggaggccaacgtggagtgcccacacacgggcagcaaggtgggttgcatgaggccgccctgggcccaaaccccaggtcacacatcaccatttgctggctacatgacttaacctctgtgtgcctcaacttcctttgctgtgaaatgggaacagaaattatactcaccttataggattgttaaagagttgccctgtctcatatagtgaatagtgactagccacataggacaatgtaaatttatttatttatttattttatttatttttttttttttcgagacagcgtctcactctgttgccaggctcgagtgcagtggcacgatctcggctcactgcaaattccacttcctgggttcaagcaattctcccatctcagcctcccaagtagctgggactacaggtgcatgccaccacgcctggctaatttttgtatttttagtagagacggggcttcgccatgttggccaggctggtctcgaattcctgacctcaggtgatccacccgcctcggcctcccaaagtgctgggatcacaggcatgagccaccatgcctggccaacaatttaaatttaaactaaggccgggtgtggtggctcatgcctataatcccaacactttgggatgccaaggctggaggatcacttgaggccaggagtttcagaccagcctgggtgaaaatggcgagaccctctaatcttaatctgttccaaaaaacaaagacagcaagaccctattctctataaaagaaagaaaaaaggtaaccaggtgcagtagctcaagcctgttgtcccagttacttgggaggctgaggtgggaggatcgcttgagcccaggagttcaagggtgcagtgagctatgatggtgccactgcactccagcctgggcaacaagcaagaccctgtctcaaaaataaataaatacataccttagaaagaagactcagatgatttttaaatttaaaaataaataaatttagtccgggcgcggtggctcacacctataatcctagcactctgggaggccgaggtgggaggatcacctgaggtcaggagttcaagaccagcctggccaacatggtgaaacccccatctctactaaaaatacaaaaattaaccaggcatgatggtgcacgcctgtaatcccagctactcgggaggctgaggcaggagaattgcttgaacccaggagggttgcagtgagcccagatagcaccactgcactccagcctgagcaacagagcaagactctgtctcaagaaaaaatataaataaataaaaatacaaatcaatacatttaaactaaattaaaaatgcatttccccagtcacactagccatatttcaagtgctcaattgtcacatgtagcttgtagctactttactggacagcacagacagaatatttccaccattacagaaagctctgttggacagggctgttatagagaaattaaagccctcagaacagggcttggtattaagtaaaggatcagcaagtattcgttattgaaattttttttctattttagagacagggtctcactctgtggcccaggctggagtgcagtggtgcaatcatagctcagtgtaaccttgaactcctgggttcaagcaatcttccctcctcagtctcccgagtagctgggactacaggtgaacgccaccaaagcctggctaattaaaacaacaacaacaacaacaaacttttgttaaaaatagaaatggagtatccctatgttgcccaggttagtttcaaactcctggcctcaagcgatcctccccatcttggcctcccaaagtgctgggattacaggtgtgaagccactgtgctcagcctgttagctattatcatgctgtaactttggtcaggggacttattgagcctcagtttcatctgtaaaatagagatagtaagccacctcatggagtgatcatctggcggaaactttttttttttttagacagggtctcactttgttgcccatgccaggggtgcagtggcacgaccctggcacagtgcagcctcaaactcctgggcacaagtgatcctctcacttcagcctcccaagtagctaggactacaggtgtgcgccaccatgcctgattaattttttcattattagtagagatgaggtctcaccatgttgattgcccaggctggtcttgaactcctgggctcaagcgatcctctcacttcagcctcccaagtagctaggactataggtgtgtgccaccatgcctggttaattttttcatttttagtagagatgaggtctcac[131 bp omitted]agctgcagtgagactttagtgagtgtggttattatcattatgggaggctcattcacctctccatgcctcagttcctggtccatataataggctaattaattagtgctgatctttttttatttttatttatttatttttttttggagacggagtctcacactttggcccaggctggagtgcagtggcatgatcttggctcactgcaagctccgcctcctgggttcatgccattctcctgcctcagcctcctgagtagctgggactacaggcacctgccaccatgcctggctaattttttgtattttttttgtagagacgaggtttcaccg[132 bp omitted]ctagaacagtgcctggcacacacaaagagcatttagtatgcgctggactctgttctaatggccttacgcattttaattaatttaaacctcaaccagccccctaaggtggttactattattatctccatttacggatgaagacattgacacccaaagaggcagaatcactggctccaggtccacaggtgggaagttgcaaagctgagatttacctgggcaagtccctgagcctgagttcatgacgctgtgctatgctgcttctctaaggggcagtgattagtattccgtgtcttcagataaaggttttcacctgttggagcctcttatagtctggcttgtaaaatgggaagagtcaacccaaccttccttctgaattgtgcaatggatatgattagatcgtgcacagcagaatgctttctggatggggccgggcgcagtggcttatgcctgtaatcccagcactttgggagccaaggcgggcgaatcgcttgagggcaggagtttgagaccagcctg[185 bp omitted]atggtggtgggcacctgtagtcccagctactcgggaggctgaggcaggagaatggcatgaacccaggaggcagagcttgcagtgagctgagatcgcgccaccgcactccagcctaggcgacagagcaagactccatctcaaaataataataataataatcataataataaaaataaacccaggcttgttggcacacacttgtaatcccagctacgtgggaggctaagacatgagaatagcttgaatctgggaggtggaggttgctgtgagccaagatcgtgccactgcactctggcctgggtgacagcaagaccctgtctcaaaaacacaaaaacaaaattcaaactccttccagtagcctacaggtctgctgtgacccagccttgctgacctctccacctcaccgcccttcccataactcccctcgtcaacactgccccttcctgcctctgggtctccatacctactgcatcctctgcttccttatctttgcaaaggaagttctttcctatctcagtttggacatcacctcctcagagaagccttctcagaacaccccagctaaaaccactccagcattcagccagggacaatttactaaatccaaacatgtaatggtgttgacagcccttgttgctaccagaaattacctttttttttttttttcaatagaggcaggatctcactatgttgcccaggctggtctctaacaactcctgacctcaagtgatcctcccacctcggcctcccaaaatgccgggattagaggtgtgaactaccgtgcccagcccagaaatcatctcaaccataggtttactttcttgactgtctccccttcattacaagtggagccccatgacagcagggcgggggcagacacagccctccctccctaaggacagactgggtcccgtatggagcccaagggacaccgggaaatgagtgaaattggagtccctggataaatgaagattctctctgccctctcagctgtgatacccgctcccccaagctgagactcctttctccctttctttccctggcttgctcctccacatctgcaatttgggtacattccccatcacaccccaatcactctggcctggacttgcctagccagacttgtctctgagagcagaggggcctgatcgaggaccacaagacccggggggagccacaggtgcacagagctgcgcagatcactctgctcacccctccccatggcagccatgaccactctcggccgtcactgtcagatgacgggttgtttcccaccctggatggagagctcagcacagggtgaggctcaaaggagacacccacggaacaactgagataaaatcaagtactgggtggatagttagggcggcaagtagacaaagggcagggactgcactctgcccgaggacgcagctccaagggattaaggggctgagtcccacccccacccaccatgcaaacacacatcccagcccctgaccttctggccatccagcagcacgcggtctcccaggcgcaagcccagtgcgctaagcatgagattgcctgggacgttgtcatagttgggtagcgtgaccttggggagggcgcaagatagtggcactgcctcttccagaagcgtccgcagctccttggccaccagtgccgcctctgccttgtccagggacatgtccataggatctgggaccacctccgccggcacctgtccttttcgattctgggggccaatgggaaaagaaggcagggactcagtggcacaggtcacacccccatggaggccctgcccctagagaccaccagtctgggtgatgcaggggtaagactaggtcatatcctgggccaacctgggaataagaagggtcagggcaaggcggggtaaggtggctcacgcctgtaatcccagtacgttgtgaggccgaggcaggcagatgcttgaggtcaggagttcaagaccagcctggccaacatggtgaaacctcgtctgtactaaaaatacaaaaattagccgggtgtggtggcgtgtgcctgtaatcccagctactcgggaggctgaggcaggagaatcgcttgaatccgggaagcagaggttgcagtgagccaagatcatgctactgcactccagcctgggtgacagagcgagactccgtctcaaaaaaaaaaaaaaagaaggggcagggcagaaaggtgcagaccacatccccagggaaacccacccctgagacccagggctgggggtgtgtcaagtaattgagggtgggcctgggggtgtaggcagtagggatgagggccacacttcagtgctgtaggtcacgccctcagggaggcaatctctggagaccccaagcctgtaatgaggacatgtgggagatgaacattgagaatgggctcctgtgggctgggtgcagtggcttatgcttataatcctagcaatttgtgaggccgaggtgggcagatcacctgaggtcaggagctcgagaccagcctggccaacatggtgaaactccatctctactaaaaatacaaaaattagccgggtgtggtggcgcatgcctataattctacctactcgggaggctgaggcaggagaatcgtttgaacctggtaggcagaggttgcagtgagccgagattgcaccactgcactccagcctggatgacagagccagtctctgtctcaaaaaaaaaaaaaaaaaattagagagagtgagagtgggctcctgtggtatagagtcaggagtcaaactctgggccagtggaaaatggggagaggcagggtctcaggggcacaggccatgttaccccaacatacatgtgcctggacggctgcagggtaattagcattgtggatggagcctggtaatgcataggtcagaggtcaaagatcatattgagggcttaggagaggaccaaccctctcattcacagaaggcctagcccaactttcctcatgaccttgaaatgctgttatgcactgccatgggataggctggatgaccctgggcagatcccttaatctctgcctcagtttccccattgtaaaacaaggcttataatagacttcacctgacatgtaatgaacactaggcatatttcagctgttattgcatttgctgaatgtacagacggcatttgtagtatttggggagtcacgggaaacgcagagacctgctggagggaagtgggggaggaagggagcaggagggtaacgggttctgggcaagggtggcagtaccctcagcgcagggttggcgccgtgctccagcaaacatttggcggcgcccaggcacaggctggaagcagcgatgtgcagggctgagccgtggttgaagtcactgcacgtggagttcaccactggaagtgggcaagaggaggggttccgggtgagcgcctgtgggaccccagccctcctcccacctcggggctcatctcttaacttgcaggtcccagagcctccgacgcagagccccgcccccacctcggagcccccctctcccttggcagccccgaccctccctagagtggtagtccctgagccccctctcccacgcctccaacctcccgctatctcctcagatcaccgtcctccttcccctcgcagcctggcctcacctgggtctccgcgtccctcacccaggtccttgccccctcccagccagggctctcctcctcacctcgcggcctcgcacccttcagcagcacacgcacgaggtcgggcacatcaaaataggccgcgtagtgaagcgcgttcatgttggtccagcggctgcgcagcgtcacatctgcgcccagcgccagcagctgctgcgagaggcgcacggctgccgcggggtcccctgcgcgataggccgggtcagcttggaacccccattccagagcatgggcccagtgcacggggaggaccctgggcttcagggactatactttgggatccgaagcttcgggttccagatggggcctgagttctgggtggttttcagcgtgttgggtctgggggcctaggctttggggcttatgacttgggggtagggggccctcaccgactccgtgggccccagctttgcacgcatagtggagcagtgtcatgtcggtcagcccgtcacgatcgttcacatggcagcctcggcgcagaatctgtgagtaccaggggagcagggagggtcacccacacatgtggggaaccgcatcccctctccccctggtttccccagtgttctcacctcattgccgatgacgtctatcttgtgctggacttggggcacccactggcgcacaatggcaaacagctcggggatggtggtctgagggtcaaacaggatctcctggcacgccgggtcattgggatcgaagaaggtgaaagctggggtggcaagaggtccaaggtcaccccacgcaactgaccccctccttccagcctcagtaggggagctgtaggtctttgccttttagagcctctaatgcagggtctcaagctggtggcacatgggccacagtcaacccacaggcattttctgtgtggccagcatgaggtttcaaactcaggtgggttcacataaaaatctcgatgcccagtgtgtcttgaaaagttggaagatcaggcaattcccatatagcagcaaactccaccccctgaaacaaaagcctgacagagagtgcagtaccttggagtctgcatgtccagggggactgctactgacctcacccactgttgccctgtgagagtatgagtgaagtttggctgaatctccagagcaaaaataaataaagccagaagtcctggtttttaataaaactctctcaattgtttcaaataccatgcagtccacatcaaatgtatccatgactgggcacagtggttcacatctgtaatcccaatgcgttgggaggctgaggcaggaggattgcttgagcccataagttcaagaccagcctgggcaacatagcaagacccctgtctttacaaaaagttttaaaattagccaggtgtggtggtgcgcattggtgctactcaaggagattgagacaggaggattgcttgagcccaggagttcaaggctgcagtgagccatgattgtgccactacacgccagcctgggcaac[133 bp omitted]tggtccaacgtggtgaaaccctgactctaccaaaaatacaaaaattagccaggcgtggtggtgggcgccggtaatcccagctgctcgggaggctgaggcaggagaatcacttgaactcaggaggcaaaggctgcagtgagctgagatggcgccgctgcactccagcctgggtgacagagagtgagactccatctcaaaaaaagtaaataaataaataaaaatgaaaataaaataaaatgtatccatgagcaggaatcaacctgtgcccagccagggtggtgcctagaggcacttctgtctcttcccactcgactctaaggagtactgctctctgtgacgtcagcacccagcacagggccctggcacgtggcaggaactcagtgcgtggtgaatgaacgactacatgaatgatcagattatacacagcccagggaagtgccacatagaaggtgtctccaggaatcagccggcatgctccttttagaactgcagtcacatcatagcccttcttggcttagaaccctcctccagctcccaacccatccagagtacagaccaaagtcttccccacggccctcagggctctgcacatccagcccctcagttctcagccctctcccctcacttattccccttccctcatttcccacactgggctccctctgtccctcccacgtgccaagcaaattcttgtctcagggtcttggcacttgctgttcttctcactcaggatagacttcccacacatcttcacaaagctttataaatctttgctcaaatgtcatctcctcagagaggccttcccaaaccacactgtctaaatcggcacccgcccttctccatctcctactctttttttttttttttttttttttttttttagagatagggtcttggctgggcatggtggctcacgcctggaatcccagcactttgggaggccaaggctggcagatcatgaggtcagcagttcgagaccagcctgaccaacatggtgaaactccatctctactaaaaatacaaaaattaactgggcgtggtggtgagtgcctgtaatcccagctactcaggaggctgaggcaggagaatcgcttgaactcggaaggcagaggttgcagtgggccaagattgcaccattgcactccagcctggagtccgtctcaaaaaaaaaaaaaaaaatagggtctgttggaatgcaatagtatgatcatagctcactacagccttgaactcctgggttcaagtgatcctcctgcttcagcctccctggtagctaggactacagtatacatcaccatgcccagcaattttttttttttttgtagtgacaacgttttgctatgttgcccaggctggtctcgaactcctgggctcaagtgatcctcccactttggcttcccaaagcactgaaattacaggtgtgagccaccatgcccagccctttatttatttatttatttttatcatagctcatatcactacttgacatgtttactcctctttctccctccttcatttcctctcttcttccctcactaggatctaaatgctatgattctattctgcctcattcactcctttatccccaaggccaggcacagcacatggcacacagtaggtgctcagtcaatctctgttgaattaatgtacaaatttaacagatacatgatttcctcttggagtccaccttagccttctccctgtcctcgaccacatttccagatttcttcacattctgggacaaaacctctcccgctctacaagcaagactgcttggagggctcagcctataccctccgacctcccactgagtcagaggccccagccacctccagctgcatttccaaaggagattttccagttttctgaggtacagcacccccccgacctcaggccccagataacttccttttacttttttctttttttgagacagggtctcactgtgtcacccaagctggagtgcagtggtgcaatcctagcttactgcagcatcgaattctcaggctcaagtgatcctcccacctcagcctctggagtagctgggactacaggtacccaccatgcctggctaatttctaaattttctgtacagatggggtcttgctccattgcccaggctgatctcgaactcctggcctcaagcaatcctcccaccttggcctcctagagtgctaggattataagccagaaccactgtgcctagccaactttcttatttttctattagactgaagtcaacttgtagtctccctgatctacctctagtgggtgacatgtccatggatgccatctgtcttgctctatcctggcaacgctgactctctgaacctggtttctgaacctcacagctgccggggattcccagcctgcatatcttccaaattcccctcctacatccaactctggctgcactccatccccttctacccagtacccagagggagctttcaaactacaaatcagacctgccactcctctgctcttaaacaccctccccttgccactcttctcccctgtcccacttagaatataaccaaagtcctcactgtagccttgaaggcccttccagatctggcctatgccaacctctcacctcaacctcgatcattccctgaatgcagctccaggatctttctgttccaagttcaattctgcctcagggcctttgcacttgctgctgtctgcctggaacactctttttccagctctcttatggctgattcctccccatgctctgggtcccaaactaaatgttacctactcagaaagagcagccctgactacccctgcaggtagctgccccctagtcattatcgtatctccacctttaatttctttttcttttttctttttttcttttcttttttttttttttcttttttttttttttttttgagacagtcttactctgtcactcaggctggagtgtagtggctcgatcttgggcaacctctgcctcccaggttcaagcgattctactgcctcagcctcccgagtggctgggattacagacatatgccactatacccagccaatttttgtatttttagtagagatggggtttcacc[136 bp omitted]tgaatttatctgatttctgatttatttatctgttcacttgtttagtctctccttctctcctgcaagggaggatcatgcctggatcacttaggattaaatctccggcacccagcataaggcttgtcacagagtagcagcactcgataaatatcgctcggtcaatgattagacactttcagtttctccaagaggccgccctctcagctccataccctcctacctcagatcctttacccagcggttacctctcctgggagccctttcccctgacccttctcttagttaaccccaactcaccctccagtcttctcaactgtaacctcctcagggaaacaatgtcttaaaaaactcttgcagcagcttgtttatggtaaatacaattttcataatgtcttgtaattacatatttatattacattatatttttctttcttgcatataaacctaaatgtgaaaaattacattatggtttaatacctatttgtgtggctgttactgaggcctgtgagttgtctcagggcaaagactgggtctctcttgccccctgctgtggccccagcccctagcataaagccaggtccacagccgctttcaaaaaatgattgttgaatgactaaatgatggaatgatgtgtcatgagtcaaagactaggagtattacaattccattctccaatgggtgaatgaatgaattaacgaggggtgctctgcagccaagattcctctggaccaccttcaaattccccagaattctcccaccatcaccaccagcagagcacagcccaccctccccggccacccaacgctccaggccagattccagggtggggacagtggttaccgtagtccttagggaggggggcaggtgccgaggggtgcacaacaggcttctgccggcgctcctgggtggggctgggggcctcggggacgggttcatcctcctcctcctcttcttcctcctctcctcggggtggcggggccatcggggcaggatctgtcttagtcatggtcctcggtggccctcggggggcgggtgcagagttgggggcagccttcaggcaaatcctggaggcagaggtcagctggagagggtgcccggcaggctccagggtccaagcccctaggagcttccagggccccgggtggcctccgcgcaactggatcttgggcaaccatagggacccccgttacccatagagggccccggtgtgtgcgcccagcgcctgccacctcccccaggcccagccccccattcttctcctcccgcgtcaggcccctcagtcgcggctgccccctccccgggtttgtttatctcgggattcaggatgcttcgcccctccccttctccgcgggccgccccctccccatcttacctcgggcagacagcgctggggaccaaagtggagactggggagactgtgggagcaatggggtgtcggtgtcaggggacgtgatgggggaggcaagggagacagagagaaggggacgaggcccagacgccgacagggggtgggggcggagagggaggggcgcgactgcgcatgcgcctgctgcccccctaccggcggcgggggaggagggaccaggaggagggaccgggaggcgctcgcattgatggaggggccagaggcggcgactgaaaggggagagcctccgggcactgggagaggaagagatggctacggaaaggagcgagatgagcagatacaacggcaaaagagagggctgagagagcggacacagatcttctccatccccttcccccacgcctgcaaaccaggccggtgagggcagtggtcttggggcgtggtgacgatggggaccctctaggggaccctctctctaggaccctagaccggaccccttctccaagctcaccattcataatgggtgcctcagaggggtgatttcctagagactcctatcatgatcatctcatccttaccatcataatgcgaggctcacacactggggcccagaggttaagcagcttgcccaaaagtacatgagtaggtgatggagcgaacatttgaaaccagacagtctgtaaagtctgatttttatttttattatttcctagacagggtctcactctgtcacccaggctactgtgcagtgttgtgatcttggctcactgcagcgtcaaacttctgggctcaagccatcctcccacctcaacctcccgagtagccgagaccacacgtgcatgccaccatgtctggagaattttttttgagacagggttttgccatgttgcccaggctggtcttgaactcctgacctcaagggatcctcctgcccctgccacccaaagcgctgagattacaggcacgagtcaccatgcccagctttgattcttaatcaccatgctacatgcctgtagcagtgtctgggaaacagatctgccgattgacccctccaactctctcagaacctgtatcttccccacggaggcctcctgaagccagcccagggtcctggctccattgtcatggcttggcttcccacctggagctgtagcctgctctgcctcaaatcatcccagcctggatggggctgggtgacagccttgaacacctcatccttctaatgcacaggtccagtagctccatctccaaaagatttccaggatctcactctccccaccgctaccctgggccctcatcttggtccatccttcttcttctgccaccagcactacggcagcagcctcttacctgctgtccccgtcctcctccaacatgcagccacagggacccatgaacacctgtcactttggagccctctttccctcagaggggtctgcctgctgcacctcactccaggtagaagccaaggctctcagccatggcccacaagggcctatgtgaacctgccccatcatctctgcactcacctcctctcaccctcttttgttcactccaccccagccacactggcctccttgcttctccctaccccaggacctttgcactggctcttttttttttttttttttgagatggcagtctcactgttccccaggctggagtggagtggcatgatctctgctcactgcaacctctgtcttccaggttcaagtgattctcctgcctcagcctcccgagtagctgggattacaggcctgtgccaccacacccagctaatttttgtatttttagtagggacggggtttcgccatgttggccaggctggtctcaaactcctgaccttaggttatctgcctgcctcagcttcccaaagtgctgggacgacaggcgtgagccaccgtgcctggcctgcaacggctctttgtgatgcccggaatgctcttcctccaaatccctacgtggctccctctctgccctgttttaggatcttacttgttggtgtcttttcaccttctctgctctaaaactgcaccccttcctcccttccctactatggttttctccatagcaacaccgcctcccagacctgacacatcccagacagcaggccctcactgcaggggttgttcgtcctctggaacctgagcctgtagcgctccaggccagccccttctgatcacccaggtttctgctaaaacatggccttggagggccctcccccaggcccaaaccaaatttttgttgtctttatagcactcatcgctcatgtctgcagtgttcttgtttatttgtttactagttcatcgtctactcaagtagaatgagcaccatgagggcagggattttctcagctgtgtccaccatggtatcatgaactcagtaccaggcttggcaaaaagcgtgggactccttagaaccaggtatgattctcccaaacaacccttgctctgctctgaggctgtcgtactgatttgcaaagatctgagccgggggtggcagaagcctggtacccaggggattgggggctgatgagagacttgggcccaggtcacccctaaggttcaagagatccctaggagtggggtggtagaacccaggcccttgagggaggcactgctactacccaggcgtgggcggtggggctgggccaagcccacgtataatgtctttcctcctccatcttctatcttttgtccctcgacattgtctgtcttgatccttatgcactggggatccgagtgtccaggagctccggcttggcatccactgtggcaggtgcagggtcctgggcaaggaccatggctatgtcaggccctccacagatgatggtgaaggtttgggattcctcaggtccaagggtctgggctgttgtctaaggcaaagaagtggtagagatggggaacattacgaagcaagttgcgggagagacagacagataacggtgaggaacagggaggcaaaggtggcaggagggcgtgtcaggaaacagagagagatgtggggagagatatgaggagacaggaaagcagatgtgagggccagagagacattcatgggaaaggaaagaagggtggggaaatgggaagagaagtgcgggggcacagacgcagacacgtgggggaaagagatgtgcaggcagacagacgtacagacagggtcagagatatgggggagacagaaaatatgcagataaagagagacacagggaggtggggaaacaggtggcggacagagatgatgggcagaaagacaatgaatgttggggagggaggagattgggaggtagggatagatgagtaggagacagagattgaatgacaggaggggaggcagagagaggcagtcagctcaggggatctggcaggctccacaaagagccccaggcccgagtctgagctctgtccctgccccactgtccctctgtgccccaggccacagtctcaaacttcaaggccccagaggcagccacactgtagctccagccaactgctatcacctgagaatccaagcccagtgctgctagatatgcagagccttcaggaaagaccagactttttttttttttttttttttgagacagagtctcacagtgtcacccaggctggagtgcagtagcacaatcacagttcattaaagccttgaccttctggactcaagcaatactcccacttcagcctctcaaatagctagaactataggtgcaacacttggctaattttttgtgtttcttgtagagacagggtttcaccatgttgcccagtctggtctcaaactcctgggctcaagtcatctacctgcttcagcctcccaaagtgctgggattacaggtgtgagccactgcactcggccattataaattattttaaagcactgcggaggccaaacaaattgtatctgtgggtcatgtccaaaccactgactatcaatctgagactcctggctgggcatggtggctcatacctgtaatcccagcactataggaggccgaggtgggctgattacctgaggtcaggagctcaagaccagcctggccaacatggcaaaaccccgtctctactacaaacacaaaacttagctgggcatggtggcacgtgcctgtaatcccagctacttgggaggctgagacaggagaatcgcttgaaccagagaggcagaggttgcagtgagctgagatcgcaccactccactccagcctgggcaacagagcaagactccttctcaaaaaaaaaaaaaaaaaaaatcggatactccttaactccagaggtactgtgggggctccttcctgagccccttcagtgagtctagcattcagagctctgtgtgggcatctctctcatacaagcagggctctgaaagccatgggggctaagctgggcacctcaagcttggccctagggttttaagacaggagaaatttcgccttggtcaaactgtgattttcagagacataacaccattcctcatcttcctcccccgccaccccacacacagagacataacacccttcctcaacttcctcccctacacacacacacacacacacacacacacacacacaccttcctcagcttcctcccctacacacacacacacacacaaacaccttcctcaaattcctcccctacacacacacacacacacacacacacacacacacacacccagcagtaaaatatagaggcaaaagggattcagatagggcctgggggacactattacagagattgcaaactccagctctataggggccaggcaggaagctctcacaggcctcttctgcagccagacacctgggtttgaatcctggccctgaaacatgttggctgcctgactgtgggcacactactggactgctctgtgcctccattttttcatctggaagatagagacaacagcagtattaagattataatgaggttttttttgtttgttttttgagatggagtgttgctcttgtcgcctacgctggagtgcaatggcacaatctcggctcactgcaacctctgcttcccaggttcaagcaattttcctccctcagcctcccgagtagctgggattacagacgtgtgccaccacgtccggctactttttgtatgtttagtagagatggagtttcaccatgttggccaggctggtctcgaactcctgacctcgtgatctgcccacctcagcctcccaaagtgctgaggttataggcatgagccaccacacccggcctttttttgtttttgtttttgtttttgagatggcgtctcgctctgttgcccaggcttgagtgcagtggtgccatctcggcttactgcaacctccacctccagggttcaagcaattctcacaccttagcctcccaagtagctgggattacaggtgcgccaccatgcccaactaatttttgtatttttagtagagacagggtttctctatgttacccaggctggtttcaaactcccgaactcaagcaatctgcctgccttggtctcccaaagtgctgggattacgggcatgagccaccgcacacagaccatagtgagttttttgtttggttgtggtttttggttttttttgagaccttgcttggtcacccgggctagagtgcagtggtgcgatcttggctcactgcagtctctgcttcctgggctcaagggatcttcctgcctcaggctcccaagtagctgggaccacatgtgcccaccacaatgctaatttttgtgttttagtgagacagtcttaccatgttgtccaggctggtcttgaactcctaggttcaagcgatctgcccaccttggcctcccaaagtgctaggattacagatgtgagccactgcattttttaaaaattaaccttgtagcagtcaggcatggtggctcactcctgtaataccagcattttgggacgccaaggcaggtggatcacgaggtgaggagatcgagaccatcctggctaacacggtgaaaccctgtctgtactaaaaatacaaaaaattagctgagcgtggtggcgggcacctgtagtcccagctacttgggaggctgaggcaggacaatcgcttgaacctgggaggcagaggctgcagtgagccgagattgcactactgcactccagcctgggcaacagagcgagactccgtctcaaaaaaaaaaaaaaaaattaaccctgtagctccagctcaaagggtcatagtgagttttcagctcactatgttataactctgtgtctggcagacaataagagcttctcaaatattaagtatttagtattagtaaatggagcaatcattactcagctccaaccaatagttgcttggcattgccagattttgtttttcaggaaaacctagaaatttgttttaattttctgtagagacagtgcttgctatgttgcccaggctggtctcgaactcctggcctccagcaatcctcctgccttggcctcccaaagtgttgggattacaggcgtgagccactgagcccgggaaagccagaaatttggaaacacggctgaatgttctgatttttgaataggggatcctagacaaaatgaaaacacactgcaggccaggccaccacccatggatggggctgccaggctggggtgccactcaccaggcgctgcagaccccggcgtgcccgtgccagcaggctctccccgtgtagctgctgtgccagccgttccagggcctgcagctgcgcctggtgccgctcctggcaccgttgcagcctccgcacccggcgttgcagtgctcccagcactgggcccagcccggtctgggcctgttgggcagggacttcaggttgtgaccgctcaggagttggcgcaggggccaggggggtcaggagcatggtggccacagtcttggggctccccgatgtggggcccagcaccactaggcgcactgggccagagactgggatggcagggctctggggcaggggtgtattcttctgtaggggaggcggcggcgagactggcttctgggtgcttcgggtcctccgctgactctggaagacaaggcatggggtgcaggggtgccgtggtcagacttcgactcaggaggaaagggatggagggtctgtttccaagggggacttgcctaggtaaggccagacctcagggaggaagtgtcgtcaggaggggagggccaaagttcagactcaaggagggacttcccttaggcagggaggtctgggggttggattccagcagcaggacctcccagcgctcaccttggcaggtggtccccgggagaagatggagggcactgcatcaggccgcaggtagcgcacaccccagcgccactggaagcaggagggtgtgaagtgctcgctgcacaagtgctggtggcagctgggcacccagtgctcacagcccatgtgctgcagccaggcctgcagccggggaccatccttcagtgggaacctgcatgggtggttggggggctgggtcagtgctacgaggttcagacttatccctcccagaggatacccaccctggaggtctctgggctccaagcctgtgcctccctagggctaggaagtagacctgtcttgtgcccaggctttctctatctcatacacacaaccacaacccttttttcagcttcatcttttagtagtagtattttgtgagacggggtttcgcacttgtcacccaggctggagtgcaatggcgcgatcttggctcactacaacctccgcctcctgggttcaaacgattcttctgcttcagcctcctgagtagctgggactacaggcgcacgccaccacgcccggctaatttttgtatttttagtagagacgaggttgcaccatgttggccaggctggtcttgaactcctgacctcaggtgatccacccaccttggcctcccaaagtgctaggattataggcatgagccaccaagcctggcatttcttcttattattattaatttgaaagctccaccttttaaacacccagcatcagcccacctctgccccctccactgcccctccttccagcctccttcctggtcttcctgcccacagtcccgcccctccactcccaatttgttcttccacatcaacttgttggagcagtttataaaatcagacagttacgatgtgggagatcgtgcagccaagcgaaaacgtttcttccacaccatataaatgggggtgtggggtttctggattaagagagatttaagaaacatcagcacaaacgcaggatgtggaccttgcctacaacaaacaattcagtaaaaagacattttaagacaattggggaaaactgaacatgaactggttataagataattgtaagaaactggtcaggcatggcggttcatgcctgtaatcctagcactttgggaagacgacaaggtgggaggatcgcttgagcccaggagttcgagaccagcctgggcaacatagggagacctcgactctacaaaaaaaaaaaaaaattagccatgtatggtggtacatgcctgtagtcccagctactcgggaggctgaagtgggagggtcacctgagcctgggaggcagaggttgcagtgagccgagattgcgcaactgtactccagcctgggtgacagagccagaccctgtctttaaaaaaaaaaaaaaaaaattcattttgctaggtgtgataactgtattggtttatacttctgaaacagtcttctgttagaaatcagtctgaaataattacggataaaagatctgatgtctgggatttactttaaaatagtgcaggacaaaaacttagaggtgtgggcagggcagggaagaagattggcaaagtgttgataactagtgacacagtgatggatactgagggctctactttttgtgtatgcttgaaaacacccactaacaagtctttaaacaactcaacaacaataaaacacaaataacctgattcaaaaatgggcaaaggacttgaacaaacatttctccaaagacatacaaatggccaataagcacatgaaaagatacttgacatctccaatcattaggaaaacgcagtatcagaaccctgatgaaatatcatctgacaaacaccagaacagctactattgaacaacaacaaaaaagaggccgggcatggtggcttgtgtctgtaatcccagcactttgggaggctgaggcaggaggatctcctgaaggcagtagtccaagaccatcctgggcaatgtagcaagaccttgtctctacgaaaaaatattttttaaattagctgggtgtggcaatgtgcatctatagttctatctacttaggaggcaatgtgggaggattgcttaagctcaggaatttgaacgctgcagtgagctatgatcacactactgcattccagcctgggtgatggaggaggaggggaaggggaagggggagggagtaagagggggaggaagaggaagagaagaacagtgtgtgtgaggatgtggaaaaactgctggaactctggtacactgctgggaatgtaaaacggtgctgccactgtggaaaacaatatggcagttcctcaaacactgaaaaatagaattaccatatgacccagcaatccacttctgcttacatacccaaaagaacacaaaacagggtcttggagagatattt[131 bp omitted]tgaaatcttgtctctacaaaaaatagaaaaattagccagatatggtggcatgtgcctagaggcacagctactcaggaggctgaggtgggaggactgcttgagcccaggaggttaaggctacagtgagccatgatcacattactgcactctagcctgggcaaaagagcgacatgctgtctcaaaaacaaacaaacagacaacagaaacatagcagcataaatcacaacagccaaaaggtggaagtgtctatcaacagatacatggataagaaaaatgctgcatatacatacaatggaattttattttatttagtcttttttttggggggagggaggagatgcagtctcactctgtcacccaggctggagtgccatggcgcaatctcggcacactgcaatctctgcctcctgggttcaagtgattctcctgcctcagcctcctgggtagctgggattacaggctcccgccaccatgcccggcttatttatttatttttgcgatggagtctcactctgttgcccaggatggaatgcagtggtgtgatctcggctcactgcaacctccgccccctgggttcaagcgactctcccgcctcagcttcccaagtagctgggattacaggtgcctgccactgcacctggctatttttgtatttttagtagagatggggtttcaccatgttggccaggctggtgtcaaactcctgacctcaggtgatccacccacctcggcctcccaaagtgctgggattacaggtgtgagccactgcatctggcctggaattttatttagtcttgatctgacacatgcaacaacacagatgaactctgagggccattagggtaagtgaaataagccagtcaaatactgacgatttcacttatatgaggtagaacagtcaaattcctagagacagacagtggaatggtggttgccaagagcctgggggagagggaaagagggaattgtccaatggggatagagtgttttaggagaggaaaaagttctggagattggttatacaacacttaacattagtgaattgtacacttaatgatcaaaattgtacacttaaaaatgatcaaaatggtag[138 bp omitted]gttcaagaccagcctggccaacatggtgaaaccccgtctctacgaaaattacaaaaattagccaggcctggtggcgtgtccctgtaatcccagctactcgggaggctgaggcagaagaattacttgaacctgggaggtggaagttgcagtgagtcgagatcacgccactgcactacaacctgggcgacagagcaagactccatctcaaaaaaaaattttttttgttttaagttttaaaaaataaaagctttctcagtggttgtgggtgaggattatctgatgagggaccctctaaatgtgccccacttctccggtttccgggtgccacttattcccagcatctgctcttaccctcttagatggtaatccactctctatttagacctgggctcaaggctacccataataaagacctccttttccagccttatttgcagccaggggtggccacatgatcaaatgctggccagtttgtccttagcagctgccagaaactgagactgtaaatgtttatttcaagctgctaaatttggggatagtttgttatatagcattagataactaagacacatctcatgcatatcccatcttcacaatgttttccatatctgtgatattacttatttcatatttttcttaaaactaaccaattttaactattaaacaaagatacttaaaagagaaactttacatcacaattgaaaatggaaaatcagtatcaattccataaacaaaagctaaccataaaaacatcagatgccattacctactgagggttatgagcctgaggcctgctctctttcttttcttttctttctttttttttgagacacggtctcattctgttgcccaggctaaagtgcagaggcacgatcatggctcactgtagccctgaactgctaggcccaagtgatcctcccacctcagcctcccgagtacctgggaccacaggcatgtgccaccacacctggctaatttaaaatttctttttgtagagacagaggtctcactatgttgtccagactggtcttgaactcctgggctgaagtgatctcccacgttggcctcccaaagtgctgcgattataggcatgaggcaccacaccccacccctgctctctctttgttgaaaagatagactagtgagtgctagagaattagggacaaaattcctacaggagagagggtaaacataggcacatccacacaaaagaatacgatgcagctataaaacagaatgtagaggtactctgtgaactgacatgctattgtcaggcacacattatgtgaaaaaaagcaaggttctaaatagactatctcagcttttagtcattgtggtagcccccaaaagctatccatgtcctaattcctggaaactgtgactattactttatttatttatttatttatttaatttatttttttgagatggagtctcgctctgtcacccaggctggagtgcagcggcgcaatctcggctcactgcaagctccgcctgccaggttcacaccattctcctgcctcagcctcccgagtagctgggactacaggcgcccgccaccacgtccggctaatttttttgtatatttatttatttatttatttagagacagggttttgctctgtcacccaggttggagtgctgtggtgtgatctcggctccctgcagcatcaaactccccaagctcaggcaatcctcccacgtcagcctcccaagtagctgggactacaggcatgtgccacatgcccagctaatttttatatttcttgtagagatggggttttgccttgttgcccaggctggtctcaaactcctgggctcaagcaatcctcccacctcggcctcccaatgtgctgaaattacaggcgtgaaccactgtgccaggcctgaatattaccttatatgacaaaagatgtgattaagttaaggatcttgagatggggagattatcctgggtcatccgggttggccctaaatgccactacaagtatccttttaataagagggaggagaatatattaccacagaaaagaagagagggcaatgcaaccatggaggcagagactggagagatgtggccacaagccaagcactgcctgcagccaccaggaaccggaacaggcaaagaagagattctcccccagaacctccagaggagtacagccctgccgacaccttggttttggcccaggaaagccgatttggactcctggcctctagaactgttagaaaataatttgtcttgttttaagccaccaagtttgttagagcagcatgggaaactaatagtgtaataaagggagaaataagaatgtctttcacatttgctggtatttatataaagaaactatggtaatgtggtttggctctgtgtccccacccaaatctcatcttgaactgtaatccccatgtgtcaagggagggacatgatgggaggtgactggatcatgggggatgtttcccccatgctgttcccatgatagtgagtgagttctcatgagatctgatggtttaaaagtggcagttcccctcttgctctctctctctcctgcccccatgtaagatgtttgctttcccttcgccttgcaccatgattgtaagtttcctgaggcctccccagccattcagaattgtaagtccattaaacctctttcctttatgaattactcagtctcaggtagttgtttatagtagtgtgagaacagactaagacacataggaaggacacacaagaaactaaagaggctaccagtggggaggaggtggatgggatgaacggagatggggagagccaagacttctcagacaaaggaagatggaggtggagggggcaggtagctggtgaaagagcacagaaaggctgactcagagaacagcagtggcacccagagagcagaaccccagggcacacagccagggagtctggctgctgcagtcagcctccctctaagatcccaatgttctcagcagccccattcttccgggacacaaacacaagatctattgcaacagcattccccattcttattgccaccatctcccaggcagaatctgccaatggactactcgtatctactctctgccttttccttactaacagaactccaactttctttgaggccacaatgtgtcctgctaaaagactatgtttcccaggatcctttgcagctggctggggcgtgtgactaccttctggccaaggaatgctttagtgttgtgtgggatctctgggatggtgccttaaatggaagggacgatcaacaggattcagcagctcaaagagcaaaggaaaaaagtcaatatcctaagaaaggtctccttaattggtcttactctctcttgttcctctggatagcagcatttgtaatgggcaatgttgctttctaaaaaactaccttaagcagacaacaagtgttcccctttgtatgcagtcaaatgctctaccactgagctatacccccatgttcccctttgtataaactattttagtcttgctggtcatcttgtccagagcatggggtggcatatactgctagaagtcctttttttctttcttactaatgtaactcaaaatttcttcaggctgattaaatgcccagtttttaaagaccacaattcccagcctcttttccagttggggtgaccaatgatgaaaaggtgccattgaacggggtttctgggaaggccttataaagggagatgattcagtttagacctgaacgctttttgctcttcctcccttcccttttcctcctataaggaatggtggcagtggtggctggggcactggcagccaccttggatggaagccacaggccaaggatggaagccacaggctaaggatgacagagcagaaagaggccgggcatggtggctcacacctgtaatcccagcactttggtggccaaggtgggaggatcatttaaggccaggtgtttgagactagcctggccaacatggcaaaaccctgtctctactaaaaatacaaaaattagctgggtatggtgacatgcgcctgtaattctataattccagctacttgggtggctgaggcatgagaatccctagaacccaggaggtggaagttgcagtgagctgagactgtgccactgcattccagcttgggtgacagaatgagactttcaaaaaaaaaaaaaaagaaagaaaaatagtgataggacccctcatttctcatgactgtggagctactatcccagtgctggtttgccaacctctgtactttctgtatatgagggaaaataaaccctgtaatagaatgtctgctgtctctctccacatgaggattacacatgcccactccattgacttgaggcttgctatatacttgctccagccaaaagaatgccagtgaaagtgacacaggccacttctaaatatgaaattgaccaagagccactgggtgattcactccactttcttttttcctcctcctgcaagaccagcaatactccaaatagggatagtttattcagcctgagaccccaattaagatactgtagagtaggaccacaaatgacctgcaaaggacatagtgtgagcaagaaatacacctttgggccacgtgtggtgattcatgcctgtaatcccagcactttgggaggctaaagcaggaggactgattgagcccaggagttccagcctgggcaacatagtgggacttcatttctttttttttttttttagacgaagtttcacccttgttgcctaggctggagtgcagtggcgcgatcttggctgactgcaacctccgcctcccaggttcaagcgattctcccatctcagcctcctgagtagctgggattacaggcgtgtgccaccacgcctggcaatttttgtatttttagtagaaatggggcttcaccatgttggccaggctggtctcaaactcctgacctcaggtgatccacttgcctcaaccttccaaagtgctgggattacaggtgtgagccaccgcgcccagcccaatgggacttcatttctacaaaaattagaaaaatttgcctgacaaggtggtgtctgcctatagtcgcagctactcaggaggttgaggcgggaggactgcttgagcccaggagtttgaggctgcagtgaaccatgatggtgctgcactctagcccaggtgataaagaccccttctttaaaaaaaaaaaaaaacaaaaaaacaaaaaacacctttgttgtagtaagccactgagatttgagaagtttgtttgtgcagcataacttaaccacactgattcctatagaccccataatttgtttaagcaactcttattgcaggactttgttactaccaagcagatacaattctaagtgataggtcccccataagagatgaccccattgccactgtccctgaaagggcctaagacagagctaatgaaagctagccaggcatggtggcacatgcctgtagtcccagctactcaggaggctgagatggagctggtccgagtgttgtgggttattgttaagctgatttaacattgtctccccacacaaccatgcttgactagcataaaaataaaaaagaaaaatgaaaaaaacaaaaaaaaaggaggctgagatgggaggactgcttgagcctgggaggctgaagctgcattgagccatgatcgcaccacagtactccagcctgggtgacaaagcaagatcatgtttcaaaaaaaaaaaagagagagtgaactaatgagtgttcccattggctgccaagcaggatttcaagttatttcctggcagccacttccctcaatgtgtctcatcttatctctcacctggcatccatgccctctcctaagcctcttttggaaactgcttctcatctaactcttaactaagtggcttctgcaagactgactcaggggtaggccctgaggtggaaatgggctagtcactagcgggtgccaatgaagacatgaagtgatttttatacagtcatctggctgctatatacagtcgtcatcattttcctccttattatacatacaaagcacttagaacagtgcctggcataaggtaaatactaagtaactattgttgttgttatgagagaggtaagagtggaaacgggccaggcacggttgctcacgcctgtaatcccagtactttgggaggccaaggtgggtggatcacctgtggtcaggagttcaagacccacctggccaacatggtgaaactccatctctactaaaaatacaaagaattggctgggtgtggtggtgtgcacctgtggtcccagctactcaggaggctgaggtaggagaatcacttgaacctgggaggcagaggttgcagtgagccgagatcataccactgcactccagcctgggcggcagagcaagaccctgtctcaaaaaaaaaaaaaaaaaaaagatgatggcagcctggactacatgatgacagtggatgtgatgagaagtagtctgggaatgtgttttccttatttcttatttatttattttgagacaaggtctcacacggttgcccaggctagagtacagtggcacaatcacagctcactgcagcctcggctcctgggatccagtgattctctcacctcactgtctcatgtagctggaactacaggtgtgtaccaccacgtccagctaattttttacattttgtagagatggggttttgccacgttgcccaggctggtctcaaattgctgggctcaagcgatcctcctgcctcgacttcccaaagtgctgggattacaggtgtgagccaccacgcccagcctatctttccttatttgttaatgatttatttaggaatttctcatttgtgtttataactgtcttgtcaaggtgttagagattttgttgtggttgttgcaggatggagaaatgtcttgagggtagagccaaagggtgggttaatggactagcggtgaatgaaaaggaaggatcatgggtaactcccaggtcacgtactcagttcctcaatgtttgatccctcacctatccatgagctctgtcatggcagaaacaagatctgtcaggattctttgtgtccagcaggggcttacttgcttctccaagaaatactcaaaaagttgctgaattaatcaatgttgccagagtcatacacaggcttaaagtccctttggccctacaccagggtccctcaaaggatccgtgacacatggactgctggctttcctggagagcccatctgaaaggcattcaccaaatccacccaacgaatctttactaagaacctactatgtgccaggcaatattctagaggttggagacacaaacaggaggaaagaagaaagacaaagaaagacaaaacctctggcttgattgaactgatattctagtgggggagataatgaatgaatacatcgaaaacgcaatatgcagacagtgatgtgttaaagagaaaaataaagcaggagacagagagaatcgtgtgtgtgtttgggtgtcagttacagttttccatagggtggtagtcataaaggcaagaactttgaaatcagagggaatcacacaggcaaagtccccagggcagcaacatgcctgccacactacaggaacatgaagtaggccagtgtcactggtgtgaagggcaggaggaaagagatgaggtcacactggtatcagggaaccagctctgtaggactttgcaggcctgctttctacctgttccagcctcactttattttttatagtgaggtgggagtcacggaagggatctgggcagaggagggcgctgatctgactcaggtgttcacaggctccctctggctgcaagcagggaacagactgggggtgacggtgggagcagggagaccaatgaagaggctgctaaaatagtccagtctggaggtgataattgccaggagcaggatgcaggaagaggagagggttagaagtgatcaaattctggacagtttgtaaagggagagccaactggatttgctgagggactggatgaggaatgtgtcctagcccacttaggctaagaccaccagggacaaacctgtagtccagcactgtcagatttatttacaatggcaatgggagagtctgcacactagagataccataggccaggggtccccaactcccaggctacagacgggtaccagtctatggcctgttaggaatagggccacacagcaggaggtgagtggcaggcaggtgagcgagtgagagaagcttcatctgtatttacagccactccccactgctcgcattaccacctgagttccgcctcctgtcagagcagcagcagcattagattctcacaagagtgtgaatcctattctgaactgtgcatgtgagagatctaggttgccctccattttttttttgtttgtttgttttttgggttttttggttttttttttagatgaagtctcactctgtcgccaggctggagtgcagtggcgcaatctcggctcactgcaacctctgcctcctgggttcaagtgatcctcctgcctcagcctcccaagtagctgggattacaggcatgtgccaccacacctagctaatttttgtatttttagtagagacaaggtttcgccatgttggccaggatggtctcgatctcctgacctcgtgatctgcccgccttggcctcccaaagtgctgggattacaggcatgagccactgtgcctggccagttgcccgctttttatgagaatctaatgcctgatgatctgaagcgtttcatcccaaaaccattcccccaaccctatcccatccgtggaaaaactgtcttccacaaaaccagtccctggtgccataagggttggggaccactgccataggccctatgggcctttgttttgtgagggagtctcaacaaacagagttattttttaggtgaaatgtaaactaagcagtgttcagattgcctcaaagcaaatcagaactgtgtgtaaagggatcaatatcaggtccggatggtgaagtgggcccagggtttgtcttctcagatgcaataaagtttacatagatgtagaatattgtgtccttatctgaagctccaaacctggattgtaaatagggactgcttttctgtgtcaaagtgacttagctcctccaagcaaaagtgagatgtttcattcttacttgatgtgatttcaaacagcaaagtttgtgatcatctctgactttagacaaccaaagtttcctactaagaaagcagtagacactcaaaggatgggaattctgccactttacatctgcagtatgtccaagagaaatattttttcctggctgggtgcagtggctcacgcctgtaatccaagcactttgggaggccgaggcaggaggactgcttgtgcccaggagtttgagactagactggacaacatagggtgatcccatctctctctttaaaaacaaaatttttttttttgagacggagtctcactcttgttgcccacgctggattgcagtggcctcatcttggctcactgcaacctctgccttctggattcatgcgattctcctgcctcagcccacggagtagctggaattacacgcatgagccaccacgcccatctaatttttgtatttttagtagacacggggtttcaccatg[137 bp omitted]atccaggcatggtggcgcgtgcctctggtcccagctacttggtagggtgaggtgggaggatcacttgagcccgggaggtcgaggttgcagtgagctgtgatcgttccactgcattccagcctgggcgacaaagcgatcttgtctcaaaaaaaaaaaaaaaaaaaagcaaagaaatgttttttcctagtaattcttccaccaactggcttatgtcagccagataaataaggagacagatcttttacagtcgaagctaattctgactttcccaagtatgacgaaagaggtaaggatgacattttttaaacctaagcaacaagaagaatgaagcacgctactaagataagacagactggaaggttttggggagacacgatcgcaagctcagtttcggatgctctgagtttcagatggctcaaatgcgtggggagggcaagtgggcatctgcaggctctctaacagcctgcaccgacttcacttcttacatccctttcactcttcggctcgcttcgctcgctatctgtagtcaatcgtctactcctgtttcccacgcctgcacctttgtatgtgcaatggacactgccaggaaggccatctcctcatggtttaaccccacttcctaacaccctcaagcaagaccagaagccccgcacagcagcactaatgctcgggccccacccctctcagggtcccgcctccctcaagccccgccccgcgctgcgctcacttgtagaagctcacagggcggttgtctgcacccaggcggcccgcagtgttggagcagttcggcgccctgcagtacttgggcatggctatccagcccccgctgagttttgccgggtcagcggctgcactttggttctcgcggagcgccgcctaaccccgccccacccgcgctcgccgcctgcctcacgtgacgtccgtggagtctcgtcacgtaccggggagagagctgagagcgcctgcctactaggcgcccctccacagtgccacagtcccgccctcgtcacgtgacgaatgggccatagcgagtactgtgcacctgcgcaaagccggcccttcgtcaccccgactttcatcacgtgttggggggaagggcggcgtcacggcgtttctgagcctgcgccaaccaaatcaactggctagtcaatctcttacggctccaccctacgcctacatccgggcaaccgttggggcgcacatagttcctctaggtggcggcaaaaaccgaggtgaggcggccgtggccttagcctcgtaaaaattaaaacctgtatgtttcagcgaataatgaaaacgcagtctggatgaaagaccccatgacgcttaatcaggcatccagtacactggctgtggccccgccccgccaggcactcgctccgcctcttcgcccccattggttctaagcgccgcccggcatccctgcgattggctaggccgggcccgtcgcgtccaataggcggtggcgccggctttcccgcggctgttcgctgttccagtgggtcgtggcggtggcggcagcggcggttaggggatgtaacggtcgcccgcctccggcgtgacgatggcggccgtagggtccggaggctatgcgcggaacgatgcaggggagaagctgccctctgtcatggcgggagttccggcgcggaggggccagtcctccccgccccccgccccaccaatctgcctacggcggcggacgcgactctcgacggcctccgaggagacggtgcagaaccgggtgagaagctgctcgccatgtctaccccagttccaggcttcctaggtttcccctagtcccgtcctgagaactgtggccccgacatcagcccccggccagtcccctcaggttgttccctgccatgcctcgtcccctaacccccgcccctttagccacggcccctcccactttctcctcgctgctttcccggctccaccctcagcgttggagcaattcgggggttcctcgctggttcccacccgtggaaatgcattttgcttctgtaaatcacagcctagtcctgctatattttaacccccgttctatcgcctttagacgtcacgatcatagctcactgcagcctcactgccctggcccccgctgagtcattaaggtcccttcgagggttcggtccagagtgttacctgccccaactcttcctcgcttctaccccgccttctctcaccttctgcgatctctatcctttttcctcaccaaggtgggattcttaatccatattgtcactcaaaactatgagaaagacgtgagaagttatttataaaatctctgcagtgctgcctggggaggagggcgtacagaacagttccctaaatcctgagacagaaaaatggaaagaaatgatttcacagtaggtagaaggaattccattagcacagcggcaattaaaaaaattgttttccagctgtgtaggcacaaaatctgtttttataaaatggagatgataagaaccatactactggtagggcgcggtagctcacgtctgtaatcccagcactttgggaggccaaggtgggctgttcacctgagatcagttcaagaccagcctggccaacatggtgaaacccgtctctacaaaaagtagaaaaattagcccggcatgctagcgcgcgcctgtaatcccagctactcaggaggctgaggcgggagaaatcgcttgaacctgggaggcggaggttgcagtgagctgaggtcatgccactgcactccagcctgggcgacagagtgagactctgtctcaaaataaataaataaataaattatactattgcattggagggaaatgaaattttaattgtgatcttcttggcacggagtccagataaagggaggatacctggtagctgctggtggagcttgttcctgccccatgactttctcctgcactgtgattataccgcccactcctggctacagggctctggctgtacctcccatgtgctctctgtcaccaaggttcagtcacactggcctgcttttggttttcctgaggctccatattcttttctgcctcctggcctttgtgattggtgagtcctcagcctgggctttttgctgcaatctgcctgtctggctccttcccatccttcaagtctcagcctgaatgtcgctatcttgaaaggccttctcgaaccccattctaaagcaaacagccaccttcatctgtcacccagcaccctatacttcatagcctttatcttatatgttcctgaaagtgccctttgagctattaaactacatataacaatagcaaattcagagaggcgttatagcaaagtggctaagagcacagactgctgctgatggtatggttggacccaggcagcctgagcttaaactttagtcctgttcttcctggcaggttatgaacttcgctttttcttttctttttttttttttttgagatggggtcttactctgtcatccaggctgtagtgcactgggttgatctcggctcactgcagtctcagcctccctgggctcaggtgatcttcctgcctcaagcctcctgagtagctgggactgcaggcgcatgccaccatacctgactaatttttttgtgttttctggtagagacagggtctcgccgtgttggccaggctggtcttgaattactgagctcaagcgatctgcctgcctcggcctcccaaagtgctaggattacaggcgtgagctactgtgccccgccaagttatgaacttatctgtgcctcagttttcttatctgtaaaatgagaataatgatgtagaaatctctcatagggtatttgtgaggattcaatgaggttacatatcctaggcacttagaacaacactggcatatggcaagtactctattcatgttagctaatactgatattatgactgtgtatttggggtaatatttatttattttttttgtttggcagcacagagttgatctgtcttgcaaagacctagtctaaaagtgaccattcataccagggcccagtaatgctgatcgacagataagacaacatgagtgccatggcttggttgtttgtgttggaatcctggcactaccccttcctggatgggtaacccctcttggcctctgtttcctcaactgttttgttcctttttttttttgagacagagtctcactctgtcgcccaggatggagtgcaatggtgccatctcagctcactgcaacctccgcctcctgggttcaagcgattttactgcctcagcctcctgagtgcctgggattataggcatgggccaccacacctgactaatttttttgtatttttagtagagacagggtttcgccatcttggccaggatggtctcaaactcttgactgagccaccacacccagccttgtttaaattttaaatattactgttcatgtggttttttactcgttgaaaccgctcaaatttctggactgtgaatctgatgtggggaaactgtctacctttggtcactactgtgtctctcctgtacagcccaaagtgctagctttggagccagactgcctgggtttgtatatcaacattgccacttgcagatgtaggatcttgggcctcagacttcttacctgtaaaacaggggtgataatagagccttcttcgtggcttgttgggaggattcaagtcttttatacatataaaagtactaagaggccgggcacagtggctcatgcctgtaatcctagcactttgggaggccgaggcgggtgtatcacctgaggtcaggagttcgaggccagcctggccaacatggtgaaaccccatctctactaaaaatacaaaaattagccggacatggtggcatgtgcctgtaatcctagctactcaggaggctgaggcaggagaattgcttgaacctggaaggcggaggttgcaatgagccaagatctcaccactgactccagcctgggtgacagagcaagactccatctcaaaaacaaacaaaaaaaagtacttagaaacttattcacaggtcaccttctcaccgcggcattcgcccccttcccctgtgctcctaacctccttatctgctttcttctctcttgcacccatcattacttggcatctatttcacatatttgttctgctccttttctatgttctacatacccatcaccagtagaatgtgagccccccgagggcagggatttgtctcttcctcaccactctgtgcttttcacctagcgttgtatttgtcaaaggaatgttgagagaacaagtgttagctgctggtggatggcgtggccacagaagctcagtgtgggtgttgaatgtagcaggacctgaatgggtggccaaggcggctgcaccatgtggtgctggctagggtgggtgcctctgacttgggctttttctttgcaggtgtcactcgagaaggtgcttggcatcacagcccagaacagcagtggcctaacctgtgaccccggcacaggccatgtggcctacctggcagggtaagcagataagggcctcgacgtctaatcattgctagggaatttggagcttggaacctgaagccatccgtaaatcgctctgagcctcatatttttcacctgtagaatgtggagaatggggcctgcctctgagagctgtggagaggattccatagccccctctctgtctagaacagttcctggcatgtagtgagtgcaatgaaagcctttattatgactacaggggggaggtgacagcgattctgggaaagacaggtgattaaagtccacgctgtggtgtcaggtaacctggatttgtgtcccagctctgccatgtatgctgctctctgagcctcttcctctgcctctgtaaaacagagctggtgaccccctctgcttgcatagttgagaagactgaagaagatgctacagctgttcattccataaatactcatgtagcctggcactgtgctaaggacgtcccctctctgggtttgtttccttatctataaatgggcctaaatagtcgtgacctgacctggcagttgtgaggatttaaaacaattacatccctctttctctctttttgttttgttttgcttttttgagacagagtctggctgtgttgcccaggctagaatgcaatagtgtgaataacagctcactacagccccaacctcctgtgctcaagcgatcctcccatcttcacctcccatgtagctgggactacaggcacatgccaccacagccagctaattttttttagtggagatgagatctcactctgtcgcccaggctggtctaaaactcctgagctcaagtgatccctcctgccccatactcccaaagtgctgggattatagccagcttaaggtcttaattagcctagggcctgacagacattacctcagaggaagtgttggtttctatttaagaacatagcaatgttaaagtgccctagaattctcagcgtaaacacctggaggagggggaggaggaggagaccagagagaaccgagggagcttgtttatttgtgggcttttctggtgggaatagaatcatcccaggaccccaacactccccacagttgaggcacattttcctctttcttcccagctgtgtggtggtgattttggaccccaaggagaacaagcagcagcacatctttaacaccgccaggtaggctgaggcctgggcccggggcaggggtggaaccaggggcttggcacgcctcccctcccctacacagcctggagatactcatgggtaggtgctcactcattcacttacatgttggctcagcagcattcgcctgtgctgggtgctgttccgtgtgctggggacacagcagtgaccagaggagacgagaatctctgctggctagagcgagacagactgtaaactagtcagcaaattacgggctgatcatgatcagtgctatggaggaaatgatggaggatgtcttcgggcaggtttgtgggcagagaataggaggaaagccttatcagaaggctcagggaacgctgccttgactctgagacctgaaggaagcgagagggtgacccataagaagctgtagggagagcgcttcaggcagggggcacaggaagggcaaaggccctgcagtggttaagaatctccggcgctttagaagcagccagggatctgggtgcctggagaaaggagcagggaagatgaggctggaccaggcagaagccacatcccgtaggccttgcagccttgtagagggtctgcatagcatgctgagtgcagagagcagccacaggagggcaccacaggccaggaatgtgcttttcacccccagccctccagcagctctattccctgctttgcttttctccacaaaatttgctcccatctctgatatgctgtccagtttcctcattgatggtattcactgtgggtctccctcagtgtgagcactcttgagagcagggactttctctgagttcatttctgtgtccctagcaccaaagagcagtatctggcatattgatggctattttctaagagaaagacttaacatgatttgggttttagaaagatcccttcagctataagtttactggggaaggacccgctcctctgccttggggctaactgatcactgctaccctggggatgtggtcccaatagggctgtgacctttggaaggcacaccatgtccctccttggcatagctcaggctcagctcctttggcccagttctccaggtggatggataaggagtgggttttctcctgcccttatggtccctaaggtacggtccttaagctacggcaggttcttgttatctgacagaagtgcattccctcttgaaagtggctttttggaccttttgctcctaactgtgggttctgttactggtgataagggcagagctgggttccattcctggctcaagcgtctattcactgtggaatctcaggtgagacacttctttcagagccttggtctcctctgaaaataaaatagctgcctccaactgggagagcattcataaggcagcagctacaaaccagagtcacacacacttgcccaatatagtatgttttaaaggttggataagtggacaacatttcaagttttttaacacaaaaatccaaatgtcccttttgtttggagaagtgagaaattctctggcctctggggcccaaattcccctgtggcagtgaggggctgagcttagtgaaatttgtcaggcccgttgtggccagttcctcacacctgtgttgcctccctaatccctgtaggcagtggagtgggtggcctggatctatagtagatggtatgcaggtgtccgcccttggccaccagtgggtgtgcattaggaggtggtgtggccagtgtggggattttcactccaactgcatatcagaatcacctggtccctgtgcctcaccgcccccccaccgccacgcaagagaaagccaaatcagttgatctgggatgaaacttgggcattggcaattttgagactttttatattgaaataatttcagacttagaatagtacaaagagctcctatatacctatgtacctttcacatatttcacaaatgttagcttttttttcttttttttttttggacacagagtcttgctctgtcacccaggctgctggagtgcagtggcacagtctcagctcactgcaacttccacctcccgggttcaggtgattctcatgcctcagccccccaggtggctgggaccacaggcatgtgccaccatgcccagctagttttttgtgttttagtggagacggggttcatcatgttgcccaaggtggtcttgaactcctgagcttagacagtctgcctgcctcagcctcccaaagtgctaggattacaggtgcgagccactgcacttggccaaatgttagcattttaccacatttgctttatcattttttgtctatatacatattaatttgttctgaactatttgagaatcagttgtagacatgatgcccctatatctctaaatacttcacgccaggcatggtgattcacgcctgtaatctcagcactgtgggaggccttggaggcaggaagatcatttgaggtcaggagtttgagaccagcctggggaacatggcaaaaccctgtctctactaaaaatacaaaaattagccaggcctggtggcaggcgcctgtaatcccagctactcgggaggctgaggcaggagaatcgcttgaacccgggaggcagaggttgcagtgagccaagatcatgccactgcactccagcctgggtgacagagcaagagtccgtctcaaaaaaaaaaaaaaaaaaaaaaaaaacttaatcaaataaatacttcagtgtgtatttcctacaaaaaaaaatgacaatctttttaaactgtaatacatccagcaaaatcaggaaatgaaaattgatatatcactctcatccactccccagagggcaccattcaggagtcagcctttgtcccatgaatgtcctttatggccaaaggattctgtctagaatcacacattgcattgagttgtcccctcagtctctttcaggctgacgtggctcctctgtcttttcttgactttcaggatcttgacatttttttttttctttttgagatggagtctctgtcgtcaggctggagtgcagtggtgggatcctggctcactgcaacctgactccccagttcaagtgattctcctgcctcagcctcccgagtagctaggattacaggcatatgccaccatgtccggctaatttttgtatttttagtagagctggggtttcccca[136 bp omitted]cactgtcgcccgggctggagtgcagtggggcgatcttggctcgctgcagcctccacctcctgggttcaagcgattctctgcctcagcctcctgagtagctgggactacaggcatgcgccaccgtgcctggctaatttttgtatttttttttagtagagacggggtttcactatgttggtcaggctggtcacgaactcctgacctcgtgatccacccgcctcggcctcccaaagtgctgggattacaggcttgagccactgcacccggccaatcttgacactgaggattgtagacgaggtattttgtagagtgtcccagcatttgggtttgtccaatgcctcctcacgggcagactcaggttctgcatctttggcaggaacagaccagaaggggtgctgtgttcttcctggtgcctcctctcaggaggtctcctatgactggtggtgttcactgggagcacttggccaaggtgttgcctgccagattcctccacttcaaagcctctcttttcacctttgtgattagcaggtatcctggggacatctttcctgagacagtgcaaatattatcttgttcctcaccaaactttcactcaactaatcttaggctttgacacttttcagatgctccccagggaaatctaatgtacagccaggactgagaactactggcttagaggtcagggctctgccctgtctggttaggtaactgcaggcaggggacttccttgtgttgcagtcacctcatctgccaagttggttcatgagagccctgactccatgaagcatgcttgaggaatcagtgcactgatggccagacagcatttgccagagggccaggcacaaggtcagggcatgcgacaggttagaggtggctacgggcaacagaaacccctccacagcatggcttaaaacccaagagcatgctcttcctgcatgtcataagtccagaggtgggcagcccaggggctgtgtctctgaacgccacattttttttttctgtctctctttttgagacagagtctcactctgttgcccaggctggagtgcagtggcgcgatcttggctcactgcaagctccgcctcctgggttcacaccattctcctgcctcagcctcccaagtagctgggactacaggcgcccaccaccacgcctggctaattttgtttttgtatttttagtatagacagggtttc[144 bp omitted]ggctggagtgcagcagcacgatcttggcttgctgcaacctctgcctcccgggttcaagcaattctcctgcctcagcctcccgagtagccgggattacaggctcctgccaccacacctggctattttttgtatttttagtagaggtggggttttgtcgtgtt[132 bp omitted]tgaggcttctggtcttgaagtcacttcatggcccaagatggagttctggctgtcgtgtgcgtatttcaggaggggaactggtaggaagcagggcaaagggttccctttgacgagtatttcaggaagtcccacacagcatgtcagtttacttctccttggccagactaagtcatgtagctgtacctgcatagttgcaagcataaaactggggttatgtcagtaaggaaagagaggcgagtggatatccaggaggcagcttgccctgtttgttgcagtaaggagccacgggaagcctgggaagcaggttgacttgatgatgaatattccatgaagttgccaaagtctcacttagcgacatttacttagttatctacacaccaatttaccatctcacgtagggagacaattattagattgttaaggaacaaaggtaaaaataagattaaaagagagaagggagtagaaggaaaccatacaatctgggaacagtgaatcttgctgccagaaacctacgagctagcctgttcattcagtgcttgtgcaggctagctaggagtatcagaaacattttggctctttatggattttccagaacaccttgagtatttagcagtggagcacaggctgcaggctaccttgatgtgatgcctgccaggatcctcccatcagcaccacccgtttagttaggccaggcctgtaccatttcctgcatctctatttctcagtgttacagggtggatagggtcttaggatacccactgcggcagagggagaagaaagcagggtccgcatacagtgtctactccatttgggtttggtgtctcagggcggaaggggcctttgcatttacccccatttctctgtgtgctttgctgggcacaccagcggcactggctctgtgggagctgcttgagctcacctctgctggcctcttccgaggcttgggaggcagaagagggcagagtcctatcagagtcgccaggatggggtctggctggccaccctcagcggaaccagtgatcagctcttttctttatccccaggaagtctctcagtgctctggccttctcccctgatgggaagtacatagtgacaggggaggtgagtcgtgatcgtgactgagtgggagtcgggggctggggggtcttggaagccattccttctgctcccggcaggcctgggagtccctggaatagctccttcctgggccagaacagccctgtagcagatgggggaggtggcttttgggcacatcctgtggcaatgccatcttcggccttgacaaccctctagccctgcccagtacagagcccagcagcagtaacgaccccaccttccctagaatgggcataggcctgctgtgcgcatctgggatgtggaggagaagaatcaggtggcggagatgctaggccacaagtatggtgtggcgtgtgtggccttctcacccaatatgaagcacatcgtgtccatgggctaccaacatgacatggtgctcaacgtctgggactggaaggtaagagccgaccagcaggcctgtggcaggcagccagctgccacagcatcctatgtcttgggcacagggagagctacatgagaggacgcagtaaagtgctcactcacccaacagataacagctattgagcacctgtgacatgctgatcccttattgtagggcacaaggcaggctcccagctagaagcattatacatatttttatattgaccagctgtgaccttaggcaagtgacttaacatctctgtgagtctgtttcctcctctgttagatggatatagtagtacttatcttgttgagttgtgagactttaatgagttgataagcactggaaggctgggctttggaacagctgtggagctggcagaagtgggtaccaagtcctggctctgcccataacccactatgtgaccttgagcacatgacatctccccctctgagcctggtagggttggggagaagcgcctccctcgtggggcttttgagggattgaggaaatttcatgggttatcctgtgaagggctcagggcagggcccagagcaggagccccatctgtgacagccataggttgtgttgtccttacatcccagccgtgactgtccccaataccatgtgtgggctgcagagcttagacccttggagagagctctggaacatactgtcccatggggaccattccaagcctctgtcccttcctctgtcggtgaggaatgagcagggtgccccacataggtttccccatacagcagctccctggagggtcccaggaagacagacttggagtggggacgagcagggagttccagcctgagggcaaaggcacaaacagtccagtggaatgagtgctggcatgagcttctctgcacttattcttccagaaagacatcgtagtggcctccaacaaggtatcttgtagagtcattgccctctccttctcagaggacagcagctattttgtcactgttgggaaccgccatgtgaggttctggttcttggaagtctccactgagacaaaggtgagtttctgtccctgcccctttagccaggccctgagggagtcaccatcggtggcagcatggtctcctgtttctccctgagatttgagggcagcggtctcgggccatttggcctctcaggggcccagctgctgcttctgggcctactctcagggtgctgatgcacaggccctgccaggaaccccctgaccctgggaccagctctcattcttggactgctgctgtccagcccctctgtccagagtggcagggttctagtgttttcttcccttctccatttggaagagcttcttagagttctcctgttttgttgtgtcctatcatctggtcatgcagggcccagctgtgtggacaagtatctcactacgccctctgtgtctccaggtgacgagcacagtgccccttgtagggcgctcgggcatcctgggcgagctgcacaacaacatcttctgtggtgtggcctgcggtcggggccggatggcgggcagtaccttctgtgtgtcctactcgggcctcctctgccagttcaatgagaagagggtgctggagaagtggatcaacctgaaggtaccacctccctctctgccatcagctggacagactctttctcgtgatatgtgtctgcaggggtgctcatcagcattgaccacacaggttctgcttatgtgactagtggtgaatgacgcccactctctgagcttaaggttccacatctgtaaaatgggagtactgctgccctccccgcagagctgataaggaagtcacgtgagataacataggcaaggcagtgagcacggtgcttggtaccctgaaatgggctcaaggtgacagttgttttcccatgactatttgatctacttcacatttcttttctcctttgagcactctggctggtagaggattgcatttttttttaattaatttatttttttttattgatcattcttgggtgtttctcccagagggggtttggcagggtcttaggacaatagtggagggaaggtcagcagacaaacaagtgaacaaaggtctctggttttcctaggcagaggaccctgcgggcttccgcagtgtttgtgtccctgggtacttgagattagggagtggtgatgactcttaacgagtctgctgccttcaagcatctgtttaacaaagcacatcttgcaccgcccttaatgcatttaaccctgaatggacacagcacatgtttcagagagcacagggttgggggtaaggtcatagatcaacagcatcccaaggcagaagaatttttcttagtacagaacaaaatgaagtctcccatgtctacttctttctacacagacacagcaacaatctgatttctctatcttttccccacctttcccccttttctattccacaaaaccgccatcgtcatcatggcccgttctcaatgagctgttgggtacacctcccagacggggtggtggccgggcagaggggctcctcacttcccagaaggggcggccgggcagaggcaccccccatctcccggacggggcggcggcagggcggaggcggacccccacctccctccctgacgggccggctggctgggcaggggctgacccccacctccctcctggacggggcggctggccgggcgggggctaaccccccacctccctcccggacggagcggctggccgggcgggggctgactccccccacctccctcccggactgggcggctggccgggcgggggctgacccccacctccctccgggacggggcggctgctgggcggagacgctcctcacttcccagacggggcagctgccgggcggaggggctcctcacttctcagacggggcggctgccgggcggaggggctcctcacttctcagatgggacggccaggcagagacgctcctcacctcccagacagggtcgcggccgggtagaggcgctcctcacatcccagacggggtggcggggcagaggcgctccccgcatctcagacgatgggcggccgggcagagacgctcctcactttctagacggaatggcagccgggaagaggcgctcctcacttcccagattgggcagccgagcagaggggctcctcacatcccagacgatgggcggccaggcagagacgctcctcacttcccagacggggtggcggccgggcagaggctgcaatctcggcactttgggaggccaaggcaggcggctgggaggtggaggttgtagctagccaagatcgcgccactgcactccagcctgggaaacattgagcactgagtaaacgagactccgtctgcaatcccggcacctcgggaggccgaggctggcggaccactcgcggttaggagctggagaccagcccggccaacacagcgaaaccctgtgtttggtggagaccaaaaaaatacgaaaaccagtcaggcgtggcggcgcgcgcctgcaatcgcaggcactcggcaggctgaggcaggagaatcaggcagggaggttgcagtgagccgagagggcagcagtacagtccagctttggctcggcatcagagggagaccgtggaaagagagggagagggagaccgtggggagagggagagggagaccgtggggagaaggagagggagaggaggattgcattttttaaaaattggaggtaccattgatttaataacttttcagtcaaaaaagactacacaaaatacataaacttttatttatttttatttatttttactttttttttttttttgagatggcgtctcacttgttgccaaggctggagtgcagtggcgcaatctcagctcactacaagttccacctcccaggttcaagcaattctcctgcctcagcctcccaagtagctgggattacaggtgcctgccaccacgcacagctaatttttgtatttttagtagagacagggttttaccatgttggcctggctggtctcgaactcctgacctttagtgatccatccgtcttggcctcccactgcgcccggccataaacttttaaactaaagcatgatctatcgatacattgcagagcttctttcctttagtatctgaaggtttgagtcaaagctgttttcccatctggaatcagttgcccatttggctatccgcccgagcgttgtggtttcctctcctgttcctggcctgcctttgtgactcactctggagatcaccttcgaggttaatggcttgtggaagagttccaagttttatctctgtcctagttggttaaacatcattttctctttttcaagcaagtgaaaagctttcaatagatagatgtttatttcctaagcactaaatgactcataaattaagtccctgtagatttggaaaaactccttaaactgtatctagaggtctagcacttcctagtaggatagacagtcctttctagatactgtaacttttttctgtaccgctttggagtacagtctttatgaagttgtttgtaagcaaaagggaataaaatttaagcctaaaggctgggcgcgatggctcacatctgtaatcccaatgctttgggaggccaaggcaggtggatcacctgaggtcaggagttcaagaccagcctgaccaacatggtgaaaccccatctcaaaatacaaaaaattatctgggtgtggtggcggccgcctataatcccagctactctggaggccgaggcaggagaatcacttgaacccaggaggtggaagttgcagtgagccgagattgtgccattgcactccagcctgggcgcaacaaaaaactctatctcaaaaaaaaaaaaaaatttaagcctaaaattcaaccctgttactacaagtgacttacctgaagttgcagtctgctgaacaggtattttccatacacagctacgtttctctgtagacagcagtgacaattctgtttccgttcatgcctctgcctacctgctggcacatgtctttcaatagcagcagtatgctatatcctgatttcacaaatcttaaaatatgctaaaatgggtgtcttagacccaaggaactgtaagtcttctctggaggcctaaggctgctctgtcagtccccatatccccgggccaggccacgtgaagcaccaaatccactggggtcccttttgcccctacaggtctccctgtcttcctgcctctgtgtcagccaggagctcatcttctgtggctgcacagatgggatagtccgcatcttccaggcccatagcctgcactacctcgccaacctgcccaagccacactaccttggggtagacgtggcacagggcctggagcccaggtactgccctgtggggagagggaatgggaggggcccacccagagtctgtccactggcattcatccatgcttccagatccatctatctgtctgtccatcccacaaatacccatcatgactctcagccctgggcattacaaagcagaaaagtccttgccttccgaggcaagcctcacagtgagaagtgaggctgggtagggggaagaaacagtgagaaaacaaaggaataatatcatttcagatagcggtcagcatggtgaagaacagtgcagagcaggtgtgaatgtggcggagtgtttccatccacatggctgacccctactaagtggctgctaagtgccagccctgggctggaagcaggacatgcctattataatgaagcagcaaaatctctgcctctctgcagtatagcaagggggctcgatgataagcaagtacacgaaaaagataatttcaataggcatgagtgctttggggaacacagcagggactcgggaaggagagtgactggggtgggctgtgctgattgggtgcctggtgagaaggagctgctgtgtggagagctgggtcccagcagttgaggtgacagcacactgggcttgttacgttgcaggaatagtaagggactgtgtggccagagcccagtgtgtccggggaggatggtgggagatgaggccagtgtggggcgcctgtagtctatcctcaggtcagtgggcagttgctggggtttcgggcgttggggtaaatgaccaggccttacatgttaggtccctcagctgctgtgtcgagagtggatagaagcactaggctgtggctttcttctcctttgttgcaagtctgttttatggaattgggggctacctaaccagggggtgccaggtgcctagggctgcctctttgtggatttctggatgctagctcctgggtgccttttccacgacagggcctgaacaggggaactgggtgtcatgaaggaaaggagggggcgagcaacccacaggcagtgttgtgttgtagtagtcgggctcacagctctgctgtcttctgttgtgctctgtgaccttgggaaggtgactatacctccctgtgcttccgttttctcatgtgtaaaatacagtacctagctcttattgtggttgtgagaatttattgcaggtaaaactctcggcctggcacagtgtaaatgctcagtaaactgtagccttcatagggagaccccaggccaagggacagctccccagcctccttaggacacagaggctttttgatcatgcgttggtgaggccaagaagaggtgggacctgagatacatgcctattatctttctatgctcagagagagagcaggagcttgggttgggtgaaatgatgggcgataaatgttcataggaatcaaaaactcaattgctctcggggccaggcaaaaatttccggtttgtagcctctatatgaaaagcaaagcagaggaagagggaagagggaaaagtagaattggagcaggagagatggatggccacaaataccatgagggatggcattgccggggaggcatctccactgtcactagaggtggctgtcactactcagtgacattgatggtgattgattacccatgtggccttgttagcttcctcttccacaggaaggcggaagcagtctacccagatacagtggcactgaccttcgaccccatccaccagtggctgtcctgcgtgtataaggaccacagcatctacatctgggatgtcaaggacatcaacagagtgggcaaggtgtggtcagagctcttccacagctcctacgtttggaacgtggaggtgagccccccccccacccccttgcccctgcttggcctctgcacagttccccacagtttgggaacccattcagtaattccttcagaagatactcattgactccctcctatgcatcaggccctgtcctaggtgctgaggacacagacacaaaatccctgcccttaacaagctcacatttggatgggaaaggaaacctggaaacatcatcagtgaataacacgccaagcagcagtaaccctctgaagaaaaatgaggcggggaaggggaaggggaatgcaggtggtattctagagaggagaggggtcagggaaggcctccctgaggacatatgagcagagacctgcaggaaatcggggagtgagacctgcaactgctggggagaaccacaagcacagaggccctgcggcaggaacatgcactccacagagagctttgctgtggaggtcgtttatgtatttcactgctttttttaaaaaggagttgaagacggggcatggtggctcacacctgtaatcccaacactttgggaatctgaggcgggaggatcacttgagtccaggagtttgagaccagcctgggcaacacaagaccctgtctctacaaataatttttaaaaattagccaggcatggtagcacacacgtgtggtcccagctactcaagaggtggaggcaggaagatcacttgagcctgggatgtcaaggctgcagtgagctgtgattgtgccaccacactcccacactccagcctgggtaacagtgagaccatgtctaggaaaaaaaaaaaagttttgaagtttttattttctgagaatgaatttgtgggtttttaaaaattctctaaagttaaccaggcacagtggctcatgcctgtagtcccagcactttgggaaatcgaagtgggcagattgcttgagtccaggggttcgagatcagcctgggcaacatgaggaaaccccggctttacaaaaaatacataaaaattagccaggcgcgcctatagttgcagctactcggcaggggctgcggcaggggggctgaaaatttcttactgggaatgtttgtcctagagaaattgggttttcagtggccagattcaggatcgtgagaaagaactttgtccttttgaataggcagcattcagcctatgactctggttgaatctgtctgccttcatggggctgacgtttttgttgacagcactttttttccactcaaagaatgttttttaataacttttaaaattcctgtatgaaatttttaaaaatttgggataataggtgaaatattacagataaggctacagtccacattgatgacttccctgcccccagttctgctctctctcgccctcaccattatcaattttattatgggtgtcttcagttgattttctttgcatctccttattgtttatgtatatagctgttcaacaacagtatctgtggatagatcttttcatcagttctagaaaattctcagccaatactgcttctaccctcttctctctctttttttttttcagacggagtttcactcttgttgcccaggctggagtgcaatggtgtgatctcggttcactgcatcctccgcctcccgggttcaagtgattctcctgcctcggcctctcaggtagctgggattccaggcatgcgccaccacgccttgctaattttgtatttttagtagagacggggtttctccttgttggtcaggctggtcttgaactcccgacctcaggtgatccgcctgccttggcctcccaaagtgctgggattacaggcatgagccaccatgcccggcctattcgctctcttctaaggttctatctaactctaaggttctatctgtattcttcatgtttctgaaaataaaaatcacacaaaagatatgtagagtttatcaattattgttagcagctttttttcccccccaagacggaatctggctgtgttgcccagtctggagtgcaatggcacaatctaagctcactgcaacctccagctcctgcgttcaaacaattctcctgcctcagcctcccgagtagctgggattacaggcagccgccaccacgcctggctaatttttgtgtttttagtagagatggggtttaaccatg[136 bp omitted]tttattgagggttgcaatatggtgatattctaaatctataatttatttttattagttggactacttacgtgaagagatatttgctctcatctgccatttggtcacccagtgctatacttcatataggaaaggcaggagaaatacttgattctttccctttatttaccagttttcaagataatgaattggttccctatcctctaaaggtaactagttttatttaatatcattataaactcatatatatttaaatatatcagatatgttttaatctattgtaattattaactttattggagctcatatcatcccatctttggccagtgagagcctcttaacattggctcctgagccctttggacatgaccctagtatttcttgatagccaccttgctgcctgggatgccaatatgttccagtctcatcttgtacatttcctgtcacacatcaggaatcaaccatttctcgaaaagaccatgtttttttttttgggctgggtgcagtggctcatgcctgtaatcccagcactttggaaggctggggcaggggaattacccgagcccacgagtttgagaccaacctggccaacatggtgaaaccttgtctccactaaaatacaaaaaattagccgggcatggtggcaggcgcctgtagtcctagctacttgggaggctgaggcatgagaattgcttgaacccgggaggcagaggttgcagtaagccaagatcaagccactgcactccaatctgggtgacagagggagatcctatctcaaaaaaaaaaaaaagaaaaaagagaaagagaaggccagggtttttttttagtacaaattgggacttcagaatcacaggttgggtgttagggatgctcatcgctattgggtcgttcttccagaagcctagttcttaaggacacaggggatggtggaattagaatatccccagtaactcatttgctttttcccacattatacatgcaacagtctgagaatggacaacttttcaattctgaagatagttaaaacaattgtaatgcatatgttctctctgttctctccaatttttaaaatagttatactatatttacaggatctgaatatgtagccattatatactatagtgtctcccttttgacccctgtttattttggaatggggaattatatatgtgtgtatatatgtatgtgtgtgtgtgtatatatatatataaaatgataaaatatacatgacatcaagttcaccatttcaactattttaaattgtaccatttggtggcatttagtacacttacagtgtcatgcagccatcattactctctagtttcagaacattttcatcacccacccaccccaaaaaatcctgtatctgttaagcagtcctccccattccccactccccccatccatggaaatgactaatctgcttctgtctttatggatttgcctgttctgaatcttttcttttctctccttctttccttccttccttccttcctttttttttttttttttttgagatggagtctcactctgtcgcccaggctggagtgatgcagtggcacgatctcggctcactgcaagctccgcctcccgggttcacgccattcttcttcctcagcgtcctgagcagctgagactacaggcacacgccaccacacccagctaattttttgtatttttagtagagacgaggtttcaccatgttagccaggatggtctcgatctcctgacctcgtgatccgcccacctcagcctcccaaagtggtgggattacaggcatgagccaccatgccaggctgtttcctttcttttcctctttctttcttttttttttggatggagtctcgctttgtcacccagactggaatacagaggcacaatctcggctcactgcaacctccacctcccgagttaagctattcccatgcttcagtctctagagtagctgggattacaggcacatgccaccatgcctgatgaattttttgtattttagtagagacagggtttcaccatgttgcccaggctggtttcaaactcctgagctcaggtgatctgcccgcctcagcctcccaaagtgctaggattacaggcgtgagccaccatgcctgacctgaatattccttataagtgaaatcatagactatgtgggcttttgtgcctggctttcacttagcataatgttttcaagatttatccatgttgtagcatgtgtcagcacttcatgcctttttatggtggaataatatttcattgtacggatagaacacattttgttctctgttatcagttgacggccacttgggtttttttctaccttatggctgttgcgaataccactgctatgaacatgtaagtacaagtttttttgtttttttttttttgaaacggagtctcactctgtcgcccaggctggggtgcagtggtatgatctccgctcactgcaacctcaggctcccaggttcaagcgattcttctgcctcagactcctgagtagctgggattacaggcacgcaccaccatgcctggctaatttttgtttttttagtggagacacggtttcgccgtgttggccaggttggtctcaaactcctcgcctcaagtgatttgcccacctcggcctcccaaagtgcagggattacaggcgtgagccactgtgcctgacgtagttctttctttcagttacatcactttgtttctgagtttttgtaggttgtttttcataccttggatcattttttaaatatcttttaccttcttttgaaacagtaggcccagcgtggtggctcacgtcggtaatcccaacactttgggaggccgaggcaggtggatcacctgaggtcaggagtttgagaccagcctggccaacatggcaaaaccctgtctctgctaaaaatacaaaaaattagctggccgtggtggcgggcgcctgtaatcccagctacttggggggctgaggcaggagaattgcttgaacccgggaggcagaggttgcagtgagccaagatcgtgccattgcactccagcctgggcgacagggcgagactctgtcaaaaaaaaaaaaaaaaacaaagtaagttatagtttttatctttttttgtgaaaatatgtttctgctgtgcttttttttttttttcttttttaagagtaactattggatttgaccttggtcctttcctgttgttcatttttatgtgataccagtttttctgaaattttagaagttggtgtgcttcaggacagattttccaactacacaagaagaactctgtcttttcttttttttgtgggggtggggtggcatgttttgttttgtttttgaaaaggagtctcactgttacctaggctggagtgcagtggcatgatcacagctcactgaagcctcaacctcataggcacaagcagttctcctgcctcagcctcccgagtagctgggaccacaggcatgcactaccatgcccagctaattttttatttttggtagagatgggatctcattatactgcccaggcttgtttcaaacttgggctcaagcagtcctcctgcctcagcctcccaaagtgctgggattgcaggcttctgttatttttatactgtgttaaaatatggcagcctgctttctgatacttcctttttgtggtcctctttatctgttatgtctcttctttcgtctcaatctcctctttactttatttcttctgtccctgttgtgattggtcaatttcatttctactcttagcagtttctcttcagtgtggagctttgtcctggaaggacaaagttcacaggatcttctccagtccctttaggccttaccccttgcactcaactgctgttggggtggatgaaaccctcctactttcagctgctgttcagtttggcccagtgtgctttccaatgaacacctcttggctactttggaattatcctgttgctgggtctgtcagatgccttattacttctctgtctcccacatgcatgctgatgatatgtaggtcttgtgattggtggtggtttgtcccactcacttgtattttggggtttatgggagtattttgtcactgagttttgctataaatgttgtctgtaggtttgggttttgctatctggttgatgtttttcttatgtcgagattttgggagattaaaaaaattaatgccgctactatcatcttcccagttctcaatcttccgtattttgaaatctctttatatggtggctctttgtccttctcagcttcattctaaatatctttagttttgtctttcagttcacttaattttctcctcagttatatctaatctttggtttttaatgtttttatttttttattattttttttttgagacggagtctccctctgccgcccaggctggagtgcagtggcgtgatctcggctcactgcaagctccgcctcccaggttcacgccattctcctgcctcagcctcctgagtagctgggactacaggtgcctgccaccacgcccggctaattttttgtattttttttttttagtagagacggggtttcaccgtgttagtcaagatggtctcgatctcctgacctcgtgatcctcccgcctcggcctcccgaagtgctgggattacaggcgggagccaccatgcccggcctattttttatttttttatttttatttttttgagatggagtttcgctcttgttacccagactggagtgcaatggcgcgatcttggctcactgcaacctccgcctcccaggttcaagcaattctgctgcctcagcctcccaggttcaagcaattctgctgcctcagcctcccgagtagctgggattacaggtgtgcaccaccacgcccagctaattgtgtatttttagtagagacggggtttctccatgttgaggctggtctcaaactcctgacctcaggtgatccgcccacctcagcctcccaaagtgctgagattacaggcatgagccaccgcgcccggccaatatgtttttattattcatttctagaagctgttctgttttggtctttttcagccctgcttggttaatctttataatttctggttggctgcacacttttaatcttgtcaaaattatcttttagttcttcaaacatattgaatgtagttattttatattctgtctgataattccaatttgggtttttttattttgtttttggtttgtctgtctgtttgttttgagacacagtctcatatgttggccagagtagacttgaactgctggtctctagcagtcctcctgcctcagcctcccaagtagctgggactacaggcatgcgccacctcccctgatttaataattccagtatttaaagtcttgctagactctgttgcttctgctgcttcttgctgatggtacctcgttttcttttgtgcttagtcatgtttgattgagttccacatttcccttggaagtttatttgagggtatgtgttaaggcctaggctgaaggtgggacatggatgatatatggtagcattttgtgtcctttttttttcttgtttatttttagcatagaaggtattgcacgatacctgtttatctttaacttactttttttttttccatgaaaatgcaacagtaagtcatagtgctgtcattgagtcatcctttgccttgtcctctgggaactgtaggtgtatcctgagtttgaagaccagagagcttgtttgccatcaggatcctttctgacttgttcttcagacaacaccattcgcttctggaacttggacagcagccctgattctcactggcagaaaaacatcttcagcaatgtgagtggcttcctttgtgaaccatctttcaggaggaacaaagacctactgtaagcttgaatgcaggggcaggagagagtctgatggaccctagatgttaggttccatgagggcaagagccggcaaccaaggcaggtccctctctgcatcactgcctcttgtttctctttctcctgccccctctctgaggtggcacgctctatcctctctgattctttgccagttggctcctgctctgcagatgtgtggacgtggccactcccggcagcccaacacacccagcccaggtgaaattgcttcctaagtcttgagatggaattccctgggagagcacctgatgagccagcccattcagctgccacacagtgaggcctcacgggggtatgggcagaatgctggcgagagccatgatgggaggctgggaagaaaagtttgctgaggaaattttggttagtattgcaagcccagtgagagggcgtctctggggagctgagacctgagtcatgcattcatttattctgcagacacttattaacgtccatgccaggtgcttggctacatgctagggacacaacagtgactaagactcttctgtcctgtggcacacacaatctagtgagggccgacagtgaactgacagccgaccatgttaatgcacaatcacaagtgcgaaaagcactgtgaaggaaaatgtgcagggtgctagtaggacatagagcagcagcatgtgaacttatctgggacatccggagcagcttcccgcggaagggacagctaagttgagattgggaagagtaaagagggaaggggagagggtctatacttagggaatagcctgtatgaaggccctggggtgggaaacagctgggtgaattggaaaacctgaaagaggccagtgtgattggaactaaaaagaccctccatgcaggaggctgtagcaggtgccctgcaggtgcacctttattactcccctcattccctacccagtgctaccatcgtctcctctgtacctgtgacatacatgctgtttttggctgcacacaatagaaaaactcaaaacaagaggtaaaagttaggtttctgactcatgaaagtagtctgaaggtaaccagtttagaccgttctgcaggaagcccttagggatccaagggccttccagctctctactctgtcatttgagggagcaggctatgtcctcatgacccagtgtggctatgggggctcctgctatcatatctgagttccaggctgcaggatggagaaaagacagcagaagaatacgtgcttgctttatatttaatagttcagaatttattcacatattcttatctagctgcaggggaggcaaggaaataattattctgattggtgaaactcccagctcaaaattagagttgtattactaacgaagaagagactggctatggagggacacgatttcagaggtgcttctgagctgctcgtgctgacctcagccctgtccttcctgcagaccctgctgaaggtcgtgtacgtggagaatgacatccagcacctgcaggacatgtcacacttcccagaccgggggagcgagaatgggacacccatggacgtgaaagccggggtgcgggtcatgcaggtcagtcctgacggccagcatttggcttcaggcgaccgaagtggaaatctgaggcaagtgggccctggcagtgtccagtgtacacctcccagctccagctcaggttctcagggcagtgggcagaagccctggccttggcacctcctgctgcccattgggaatgaggggctgtgaatagtaatcccatgaacagctcccattgggaacttaagctcgtaagaggcttccagaagggctgagagcagagtaactaccaggacctcagcagctagggtgtgcagattttgcctatagagtgtacaggcaagctcacatgactctagggcagcgtgacactttcaccagccacatggtaccagtgctgaactgtcaccgaagatgccagctggaggagggtcctggtggctctgggagaggggctatgagggtgggatagctgagagttcaggctgcttatgtgccctgttgaggtttggcaggatgttaccaacccagtaggtgctagtgggacataggccctgttgctgggaccaggtttaagatgacaaatgacagctgtgaccacctgggtattggagccactggggaatggaggagagttgggggaaactagaggggacataaaggggcagcagccaccaggcagccccaggagagtaggctacaagttttcaaactttcctgttgtcaagaagagcagaaagtgccgatttttttctgtgaaattcgataatttttaaatattggcacctgttttgatatcagtcactgtatgagaccagctcagtgtgtcagtgagctgcttacattgacatggcactgtctggagtggcaaaacggtaccaagagccaacatggggatagtgctcttcccccttggtgggcgctggcctgagcactgtgttgactgatttaatcctctcactgacccctgatgtaagtgatgttattggcacaaggtgtctggagtaagatcacacgggtagaatgaagaagctgggatgactcgatgactgatttcatttggggagaatcaggaaggtctagatttgagactcttttaacaatgagagactggaatcaaatgttctcatccatagctcctatcctggactatgacctctggcccctagcccctggcccctgtcctaccccagggaccacctctgatgcagccctacgtaaacacctgcccccctagaagactgtcctagatccctggggctctgttctggcccaggcaccacaaggggctgctgcctgctgaggtgctccctggttcaacacggctccctttacgatggcaggtttctaaatgagaaaagtggttgtgcatgtctagagtatttggccatgataaggggttctcattgttggtggcctggccattctgacctattctagaagtggtagagcacatggggctggggtgtggggcttcagcgggcggtgtgtgtctcccaggatccacgagctgcacttcatggacgagctggtcaaggtggaggcccatgatgctgaggtgctgtgcctggagtactccaagccagagacgggtgagcccgcagcaggggtggaatgggggtcaggcagggaggcagcccccctggcagggccacagaaaggggtagttggtgtctggtgggactgtggatgacagctgggagttttgtgttcggtaagggcccctgtagctggaccctgagaccagagtggctgggacttcagaaagcaagacacccgcaggcaggactcagcttgacttgcccgctgctggtgccagcacccaagccaaaggggtggatgtatgaatgagtgaattgtgaatgagaagatagattgattgttaggcattattttcaaaaagtttgaagcctatagaaatattgggagaatattataatgaacaccccataggcttcacccaaattcctcaattttttttttgagatggagtcttgctgtcacccaggctagaggggagtggcaccatctctgctgactgcagcctccacctctctggttcaagtgattctcgtgcctcagtctcccatgtagctgggattacaggtgcctgctgccatgcctggccaatttttgtatttttagtagagatggggtttcaccatgttggccaggttggtctcaaactcctgacctcaggtgatccgcccgccttggcctcccaaagcgctgggattagggcatgagccaccacacctgacctttttttttttttttttttttttgagacaagagtctcactctgtcgccctggccggagggcaatgacgcgatctcagttcactgcaacttccgcctcccaggttgaagcgattcccctgcgttcaagcgattctcctgcctcagcctctcgagagtagctgggattacaggcacgcccccaccacacccggctaatttttgtatttttagtacagacggggtttcaccatgttagcctaggctgaaggctaggaccatagtagggtctccagacctcatggtcctcttcattaaaacaacagaaaattccttctgggccatcagatgagatcatgagataggagaagatttccaagtgaagatttcgtttgtttcaagacagagtcttgctctgtcacccagatgatatatggatgatatatggtagcattttgtgtcctttttcttgtttatttttagcatagaaggtattgcacgatgctggtctcaaactcctgacgtcaggtgatccacccgccttggcctcccaaaatgctgggattacaagcgtgaaccaccatgcccggctcctcaagatgttttctaggctgggcacggtggctcatgcctgtaatcccagcactttgggagttacagagttggtggagttatatcctgatgtgattttccccatgttcttctttcgttctctcatcccccatgctgtgtgccccaccaacttgtcttgaaacatatcttcactcggttcgcctctcctgatctcccctctgcctcaggtcatgttattaggcctcagacatagcaagtgaccagagtagggaaggctggtggcagatgggagtctggccacaggcagtcaataggacctgaacaaggcccaggtagccagacctcagagggtgagaggacactggttttggaagaggctgagaggttgccagggctttacccagcacagacccagcaggcaagagcgctgggctctgctggggcgtctgctgtggatgtccctggaggagcgtccatgcgcccatcgagactcatcctccctgagctggtggtgaggaggtgaaatgccagggtgtgggggctctgggaaagaccacacagagctaagggagtggcccttgccaggcttgggccaagttggctacagttgaagaaccaaagaccccttctccgaggactgggcagcttggtcacactgcccttctgggaggccagggcacccacgcagccttcaggaaccagtctcattctctcctctcacagggctgaccttgctggcctcagccagtcgggaccggctgatccatgtgctgaacgtggagaagaactacaacctggagcagacgctggatgaccactcctcctccatcaccgccatcaagttcgctggtgagcccctttcttcccgctccctgcgccttgctagctaccctgctaaaaaaggattcattctttcaactctcctgtaaaatatatatccaaacaagtgaatacagtatctgtgtacagtatacagaataatgactggggccgggtgtaatggctcacacctgtaatcccaacactttgggaggccaaggagggtggatcacctgaggtcaggagttcgggaccttcctagacaacatggtgaaaccccgtctctactaaaaatacaaaaatttgctgggcggggtgttgtttctgtaatcccagctactcaggaggccgaggtgggagaattgcttgaacctgggaggtggaggctgcactccagcctaggcaacagagtgagaccctgtctcaaaaaaaaaagaataatggccaggtaccatggctcacacctgtaatctcagcactttgggaggccaaggcaggtagatcatgaggtcaggagttcgagaccagtctggccaacatagtgaaaccccatctctactaaaaatacaaaaaaattagccaggcatggtggtgtgcacctgtaatcccagctactcgggaggctgaggcaggagaattgtgtgaacccgggaggcggaggttgcagtgagccaagattgcgccagtgactccactccagcttgggtgacaatgcgagactttgtctcaaaaaaaaaaaaaagaagaatataggccgggcgtggtggctcatgcttgtcatcccagcactttgggaggctgaggcaggcagatcacctgaagctaggagtttaagaccagcctggccaacatagtgaaaccccgtctctactaaaaattcaaaaaaagtaaccgggcatggtggtgcacacctgtaatcccagctacttgggaggctgaggcaggagaatagcttgaatccaggaggccaaggttgcagtgagccaaaattgtttcactgcactccagtctgggtaacaagagcaaaactccatctcaaaaaaaataaaaataaaaaataagctgggcgtggtggccgaagtgagtatccacagttcttaggagcaaggtttgaactaggacgttgttgatagcagagactgttctaattgctcatggtcgtaatattgttaaatacggtacttggattcaccacgtgcaggttaagaagcagaacattaccagaggcttgcaggccttctctgggtccctcccaggttacccttcctcccttatatggggctcactcccttctgtgagccaatgactcctccttgagcaacatctaatacttgtatgtcaggcctggaccctctcaaatgtcctgtcatgaaggagcatgtgtgatgtgcccagactcagagttttatatttgttctgtcatttcatcctcaccaaactgttattctgtaaagaaatgagacggccgggggcatctcacgccattgcactccagcctgggcaacaagagcgaaactctgtctcaaaaaaaaagaaatgagaataataaaagcaagaatgtttctaatgcttaccatgtggcagtccctgttccaagggcttcacatcactctccagagaaggaactgtcaccatgcccattgtacggaccggaagttgaggctcaaaggggaggcccaggttcagagcagtgtttaacagctttgaccttggcaccagagaatgcctgggttcagtcctgcccctgtcctctctgtgtgccttgggacaaggactctgtgaacctctgtgttcatgcttgtccagtgggatgggtggtgagcattcaggaagacccgctacatgcatggggcctggcccaaggctcatgtggatcttgcagttgatcctgatggcacgagcctcccagcctgtctccactggtcgctgctgcagtcctgcctctactccgctactcaagtcacctatctcaatcccagactggagagggtgtcccttctttgtccccagcctttgtttctctatatgcccttgctctgcagagcctgccttggccacagctccacctgtgccccctcacacgtacagctcataccttacagagtcccacccagacccagcacccacctcaccacctttaggaagccttgatcccagcacagttgattgatggctcttgcagtggagttccccagctagggtcccctgcccatgtggcccagccctgcctaacacacagcgtcctcctcccctaggcaacagagacatccagatgatcagctgtggggctgacaagagcatctactttcgcagtgcccagcaggtagggtggcatggcctccttgggggctggggtggggggttgtcggggcattctctgaaggtcctgccggccctgccagggttcggatggactacactttgtccgtacccaccacgtagcagagaaaaccaccttgtatgacatggacattgacatcacccagaagtacgtggccgtggcctgccaggaccgcaatgtgaggtaaggggtggccctggacccttagctggcctggtctgccttgtcctaggctgtctgctttcctccctctgttcctctggtccccaagaagctgggaaggaattgagggacccagcaggtgttccttcttggtttttttttgtttttgtttttgaggcagagtcttgctctgttgcccatgctagagtgcagtggcaccattttagctcactgcaacctccacctcctgggttcaagtgattctcctgcctcagcctcccaagtagctggaattacaggcgcctgccaccatgcctagctaattttttgtatttttagtagagacgaggtttcgcc[142 bp omitted]gcctccaggtcagcagagggctttcttctggctctccctagagccggtgtgggatgactaaggtgctgatgtggcacataaactccctcattcacccgtattccctgagcacctaactgggctggatggtgctgggatcatggcagtggccaggatagccccaggccctccttcatggagctcacagtccagtagaatggacacggccacctcacagccacagacagtgacagagtggtcagagatgggggagcccaggggccctgtggagacacctgaccccacctgcggatcaagcaggacttcctggaggaagagacaccttagcctggggaggatgtggaggagcgagccagggggaggcagagagtgagtgtgcagagggcaaagcagtgcaaagaggctctgcaccccttcccagttctttctcatgcggtgccaagcactgagcttgcagtgtgtgggggagatgaacattaactcagtggataccccaggacaacctcagcttgagatggggtttcagtttcagtctaggcatcagatggggacaagaggtagcagggggcttccaggggaggggaggacagcaagagccagagaatgaggtggtggggtaggcggggccctgttggccgcaacatgcccctacttccccagagtctacaacactgtgaacgggaagcagaagaagtgctacaagggctcccagggtgacgaagggtccttgctgaaggtgaggagttggagacccctgtctgtctgctgccctgatgggccacctattgtgacggcccacacctgagacctgtgcccttggtccttcctcagtgcaccgcgctgcccagcaccttctcaggcctggttaaacaaggatgcttgcgagagggtggggagggtgaccccagctgtgtttcctttatttacagagcccttccccaagtggggcgtctaagtgggttccattttgagtggcagcagggtatggtgggaagaatcagaggcatgaactcccctcctggtttgcccacaccagccacgggtcactcaggacaaggggggaccttctcagagcctctggtctaggacagttatgggttcaggttctgcctcaggctgactgtgtgaccttgggcaagcatcatctcttgaaatgcacacagacagcttgtctcatagacttgttctctggaggagttcagtttgcacatgttcagtgcttagcacagggcctggctactgttgttactgctgcggtggttgttaatttcttcacgtgtcgaatgggagcgggagctcctgccctgccagagtcccatgtgctgtgcatgcagcacgggggagggaggggcccaggcctcatcataaggaagaagcaggcagctggagtgacatgtgggtccctttcctggcaggtccatgtggacccctcaggcaccttcctggccaccagctgctctgacaaaagcatctcagtgattgacttttactcgggcgagtgcattgccaagatgtttggccattcaggtgggtgtgcctctctgcttgggatgcctccccacccgcccacaccctctgactccgaaggcaagtgcagcctctctgctttgtttgcagaaattattaccagcatgaagttcacctatgactgtcatcacttgatcacagtatctggagacaggtgggacatggacctttgggagagttgtggctcagataccatgagcactgcactcagcctgcctgtgtagagagcatttctaaactgcccagtttggattgtgggagtcttggtgtcacacccagccctgagttcaaataccagctctaagctgggcatgatggctcacgcctgtaaccccagcactttgggacgctgaggcgggtggatcacttgagctcaggagttcgagaccagcctgggcaacatagcaaaaccctatctctacaaaaaattagccgggtgtggtcatgtacacctctagtcccagctactcaggagggggaagatggcttgaacctggtaggtagaggttgcagggagcacagatcatgccagtgcattccagccttggtgacagagcaagaccccgtctcaaaaaaaaaacaaaacactaaaaaaacatatcccagctctgccatttattttcttgtcaccttgagcaggttatttcccctgagcctcagtttgctcccctgtaaaagacaccaccgtttacatttaccttaaaaatggtgtgatgaggccgggcgcagtggctcacgcctgtgatcccagcactttgggaggcctaggtggatggatcatctgaggtcaggagttcaagaccagcctggtcaacatggagaaactgtgtctctactaaaaatacaaaaattagctgtgcgtggtggcaggcgcctgtagtcccagctacttgggaggctgaggcatgagaatgacctgaacctgggaggtagaagttgcagtgagctgagatcgcgtcactgcaccctagcctgggtgacagagcaagactctctcaaaaaaaaaaaaaaaagaaaattgtatggtgagaaatgaatgagatgatatacatacattctttagcacatgggtggtactcaaggaagtcccttttgtcactccctttgatttaccccagttcttccccacagcccccttcctcaggtcttgaggcctccagaacaggccctggtttgctgggatgccccagacctgggcccagggtgtggatgtggcaagtccagcacccctgcactaagcggataggggtgtgttttccaggagcatctggagaatggggtccaggctgtggtgtgggtggcttcagggtcagccacggcagcggctcccatgcttactcttcctctgccttgtgtgtctctctttgacctccgcagctgcgtgttcatctggcacctgggcccggagatcaccaactgcatgaagcagcacttgctggagattgaccaccggcagcagcagcagcacacaaatgacaagaagcggagtggccaccccaggtcctggcagcccctgcctgtccaccagagggatgagtccctgccagggccccatggagtgatgctggggacacagtggtggccaagacagccctaggccctgcccttagcacactcacagctgagtaggggagacagactttgaatatgcagttacagtaatagatacaaaaaggttttgtggatttttttaattttcgtaaataatagagacagagtcttgctgtgttgcccaggcttgtcttgaactcctgggcccaagtgatcctcccaccttggcctcacaaagtgctgggatcacaggtgtgagccactgcacccggctatgagaagggtattaaagtggaaaagcaaagtgtttggcgagcctctcagcactgtgatgggggatgccccaagcggctgtgggaacagagcagtccctgaccggccagccaaggggaggggtgggtagacaggggatctgaggggagggctgcagtggggccacgtgtcctcttactcccacgtgaaagctgtagcttcacttacttctttgaatcttctaaatatatttctttcaagtctttatgtagcaaagccaattttatttgcagagaactcatgttctggtttttgatttgaggttttggtttgggtattgctcattttgagtgggaggttttttggttttcttctcttctgctgctgggtgtgtctgtttttgccattggctccatgtggctcccagggcaatgtggagaccaggccttgacatgggccactggtcctgaggtcctgaggtggtgttagagatatcttgcttttgaggctcccactccacccccaagctatgaaccagggccctggcttcagtgcctgcctcatgccaagggtgttttagtttcccgtactcgggaagagccaccatcattgctaccacctacaggaagcccagcacaggactgcagccccgctgtctgcttggctttctgtcccattgctgtggccctgagagtttgcattcgtttgtagcctggcctttgttaatctcatctattgtggtgatgtgtttctagtggggagacggcatcaagtgagagacttgccagcaccatcttgaccagcagccaagaatatgttcacatggagcttagcacagggcccagccctaggcaagtccccaccaccagcccatttgcctgtattctctccttaccatcctcattcctggctttaggcaggatacgtatgtgtccacacctagtgagattcactccctgagccctggagagcaaacagaggatgatctggaggaagagtgtgagccagaagagatgctgaagacaccatccaaagatagcttggatccaggttggaaaaggggccctattttgaactatgtcagtgtagggaatcattgctgggttttgcccatgaccttgtttacagggcctggcacatattaaaactcaggagtcgacagggtgcggtggctgatacctgtaatcccagcactttgggaggccgaggtgggtggatcacctgaggtcaggagttggagaccagcctgaccaatatggtgaaaccccgtctcaactaaaaatacaaaaattagccgggcgtggtggcgtgcaactatagtcctagctactagggaggctgagacaggaaaattgcttgaacctgggaggcagaggttgcagtgagctgagatcgcgccactgcactccagcctgggcaacagagcaagactccgtctcaaaaataataataataataataatataaataaaataaataaaattcagtaatcaggcttagcgtggtggctcacacctggaattttagcactttgggaggctgaaatgggagggtcacttgaggccaggaggtcgagaccagcctgggcaacatagcgagagcccatctatgcaaaaaaaaaattttttaaagaaattagccaggcatagtggcacacatctgtagtcccaactacatgggaggctgaggcaggaggatcacttgaggccaggagtttgagaccagcctggcacgtaccaagaccccgttcctacaaaaagaaaaaaattagccaggcctggtggtgcacacctatagtcccagctacctgaaaggctgaggcaggaagatcgcttgagcccaggaattccatgttataatgagctatgattgcaccactgcactccagcctgaataatagagtgagatcctgtctgtagaaaaagaaagaaactcaataatcatatcagtcaagactctttcagtataaaagcaaccaggcttaagtcaggaagaggattttttggtgcctgaaaattggagaggattagctttcagcatggctagatccagatagacagatgatgttaaaaggaagatttttttttgtatcttttggctctgcttttcttcatgttggctttgctgatggacagactgtccctttactaggggaaaagatacccccagcaactacaggcttataaaactccatagagaatagaacacctctttcctatagtagctcaagcagagtcttagggttgtgtggctcatgtttctggtatctgctgtacccacttctgagccagttgttgtagctgtccacatctcagcatgtgatcacttctgagggcagagactgtagtcagctccatccactcacaccacctgaccaggcatcaaagatgtgtttgaggccgggtgtggtagctcacgcctgtaatcccagcactcagggaggccgaggcgggtggatcacctgaggtcaggagttcgagaccagcctggccaacatggtgaaaccccatgtctgctaaaaatacaaaaattagctgggcgtgatggcgtgcgcctgtaatagcagctacttgggaagctgagacaggagaattgcttgaacctgggagacggaggttgcagtgagctgagactgcgccactgcactccagcctgggtgacaaagcaagactccgtctcaaaaaataaatgaacaagtaaaaataaattgaattatgttgcggatattgtccggaatctttttcctctgcaaagtctctcatctacctgtatgttggtgaatacaaagcagacgcctgcgaaattttaagttattcccctccaggtggccatttaggtttttcctgattgcacatcactgttaatgaggctatggagtggagaccactcctaagcctcctcgaaatgtgaggacttctccaggagagagtctgaggagtagcaccactggatcctggagttattttattttactttaaaaaagttgttttattattttatttcactatttttgttgcccaggctggagttcaatagcacaatcatagctcactgtagccttgacctcctgggctcaagcaattttccctccttagcctgtggagtagctgggaccacaggctcaagctcccacacccagctaaatatgtgtgtatcaggggatggtgtgtgtagagacaaggtctcactgtgttgcccaggctggtctcaaacccctggcctgaagtatcctcccacctcgacctctcaaagtggtgggattacaggcttgagccagtatgcctggcctttattttaaaagagaaccccggctgggcgcagtggctcacacctgtaatcccagcactttgggaggccgaggcgagcggatcacgagttcaggagatcgagaccatcctggctaacatggtgaaaccccgtctctactaaaaatacaaaaaaaaaaaattagccgggcatggtggcgggcacctgtagtcccagctacttgggaggctgaggcaggagaatggcatgaacccgggaggtggaggttgcagtgagccgagatcgcgccactgcactccagcctgggcaacagagcgagactccgtctcaaaaaaagaaaaaaaaagagaaccccaagagttctccaaacccagttactgccccaccctgcattgcattaggctctccattgtccccacacttttcctgccatcctttggtagtattaagctttttcacctcggtcagtctcgtgagtcaaatatcgcatcccacggtttaagtttgcatttccctaacccccggtgctgttgagccttctgacttctgggttgtggtgttgcctctttggggactgcccggttatgtatgtggcctgtttgttgggttgtttgtcctcttttcatggattctgtgtctttccagatcctcgttgcctgctaaccaacggcaagctgccactgtgggcaaagcggctggtaagtcttcagggagagggttgctcaggggctggcagaggaaacgcctccccagctctgccttctggaagccctttttcctttccatgtccctcttttccctggagaagccctgtcatccttccaggctcagtgagacagccctttgttcatgatcagtgctctctgccaggcattgttctggatgtcagggacacaacagtgagcaagggaaacaaaagtctctcccttcacaggctcacttgcctgtgtgggcgaggaacaatatccccattaaataagtaaatgacgtagtaggttgggtgctgataagtgctgtggagggaaaagaatcaagaaggaaaatacgtcagccaggtgcagtgatacgtgtctgtggtcccagctactcaggaggctgaagtgggaggatcacttgagcccaggaggttgaggctgtagggaactgagaaggcaccactactacactccagcgtgggcaacagagtgagatcctgtctcaaaaaagagaaaaagaacaggggcccagcacggtggttcatgcctgtgatcccagcactttgggaggccaaggcaggttgatcacttgagcccaggagttcaagaccagcctgagcaatatagtgagaccccatctctacaaaaaataaaaaaattagccaggcatggtggtgcatacctgtagtcccaggtactcaggaggctgaagtgggaggattgtttgggccagggaggtcgaggatgcagggagctgcactccacagcactccagcatgagcaacagagccaacactttgtctcataaaaaaaataaaaataaaaaagaaaataaggagtgttggggggtgtcagttttaagtaaacaggaaaggcctcattgggaaaatgatgtttgagcagagttgaagcaagtgagacaggcagatactgggacgaatgttctagtcataacagcctatacgtgtaaaagccacgaggccaggagctcgagaccagcttaggcaacataatgagactcccatctctacaaaagattaaaaatagccaggcatggtggtgcacacccatagtcccagctactcaggagcctgaggcaggaggatcacttcagcccaggagttggaggctgcagtgatcgtgctactgcactccagcttggatgg[139 bp omitted]tggtaaaaccccgtctctactaaaaatacaaaaattagctgggcatggtggtgcatgcctatagtcccaactactggtaaggctgaggcaggagaatcacttgaacccaggaggcagaggttacagtgaaccgaaatcatgccactgcactccagcctggcgacagagtgagactccctctcaaaaaaaaaaaaaaagaaagacaatgtggattataagagacagaataagagaggtgaatgaaggatgatcccaaggttggggcatgagtaactggaaaaaacaactgaaacagggaatctttaggaggagcaggtttgtgcagaggaaatgagttgagttgtcagcatgttaactttgaaatacctaccagacatccatacagaaatgtagagcagtcacatgtgcaattctgaagtttcagagaaaagttcatgaatcccagctgggcattcccagcactttgggaggccgaaacaggattccttgagcccaagggtttgagaccagcctgagcaacatagtgagagtccacctctaccaaaaaccaacaaaatgggctgggcgcagtggctcatgcctgtaatcccagtactttgggaagccgaggcgggcggatcacttgaggtcagcagtttgagaccagcctggccaacatggcaaaaccccatctctactaaaaatacaaaaattagccaggtgtggtggtgggcacctgtaatcccagctactctggaggctgagacaggagaattgcttgaaactgagaggtggaggttgcagtgagccaaggtcacgccactgcactccagcctgggagacagagcaagacttcgtctcaaaaaaaaaaaaaaaaaaaaaaacagagaaaggttcacgctggagatatgtacctggaagttgtttctgaatggtattgaaagccaagagtccagatgggctgtgtgaaatgtccgtgtcgctccctgcagtgagtgagcactcagccagttgcctgactgtccgatatccttcaagctaggggacgatgatgtggcagatggcttggccttccacgccaagcgcagctaccagccccacggccgctgggcagagcgggccggccaagagcccctcaagaccatcctggatgcccaggacctggattgctactttacccccatgaagcccgagagtctggagaactccattctggattcactggagccacagagcctggccagcctgctgagtgaggtacacacttccaccgcagcctggcccatagccccggcaccgtgacggccccagggcctggcgccttaggctgactcccactccatgggggcagggaggattacatgagatggtgaagggcaggagggtgagccccaggtctgttgcacagcaagacttcccaaggcagacagggagtctttggaaagtgggtcacttgggggttaagagcttggatgctagagcaggcttgtacccaagtgggggacatttgggtagatcgagccctgaccctacccattcctgttgtgtgacctggagtaagaggcttacctctttgggcttcagtcttctaaaaagtagtcataatggggtcaggggcagtggctaacacctgtaatcccagcatttggggaggccaaggcaggaggattacttaacgatcacttgaggagttcaaggccagcctaggcaacgtagcaagatcccacctctacaaaaatattttttaaatttttttgtttgttttgtttttaaatggtaataacaatctcttctgccccagagggcttttacaggaatccatgcttaagtatagggcctgggctcttagaggtgcccgtgcaactttagctctttctctactattttccaaacaaaattcatttttatcctatcctataatttgtcatcttcattgtggtataatatacatccagtaacatgcacagattttaggtatacagcttgatgaactatctgtgtaattcacgtgtgtccactaccctgggcaaaatctggagtgttttctacctcatagaaacccccttctgcccttcccagtcaggtccccgcaccaggataaccagtgttctgacctctcaccaaggactgggtttcctattcttgaacttgatataaatagacacgtagagggttgggcctcctatttttggtgccacacctcttcctcatctgtaaagggactgataatgcaggggcagaccaggacaagctggttgcgagtggagggcatggcacaggccctggttcacagcctccagcagtggggctgctggcatggttcctggcgcactgttggtggccccagccatgcctgcctcagaatggctgtgctgtcttccccatagtcagagagtccccaggaagctggccgcgggcacccctccttcctgccccagcagaaggaatcatctgaggccagtgagctcatcctctactctctggaggcagaagtgacagtcacagggacagacaggtgggtgtcctttccaccaagggagccttagttggaggaacccccagctgatagctgcatcctggaagaagtgctctctgccttcccagtgggcttgtgggagtggggacagttgaggcctggatggggcaggagcccagccttagttccctggttccaggtggggtacaggagggcctgacctgggggaaggagggggcatttggaggaggcggggaggctgtcgcagtgctcctgcaggagcagcgggtacaggtgcctaggggctccgggtggggctagctgttgagtctccagctgaagtccttgttccctctctgcccccactggcactgcagccagtattgcaggaaggaggtggaggccgggcctggagaccagcagggcgactcctacctcagggtgtcctccgacagcccaaaggaccagagcccgcctgagggtgagtgcagggcaggcagggaccctgtgacagtctgtgcgttcagccaagcccctttctgggcaccgatggtgactttgacccagtactgaagctcagagtctgtcgaggaagacacatgtggtccctgctgctgcctgaggattctgggcccagctgcctacagctgagagcccagctctgccacctccttgatgtggaacttcccttattcataaaatggggggcagctgctcttaccatccctcctccagatggggaaactgagcccagggaagggtagccctggccctggctcaccagaatggtcaggctgtgggctcctgaccccgactctgtccttcagactcgggggagtcagaggccgacctggagtgcagcttcgcagccatccactccccagctccgcctcctgaccctgcccctcggtttgccacgtcgctgccccatttcccaggtaagcaggggccagacacgcaggggactcgctgctcgggcctggcttagggccagtcacaatgtctaagcacaggccctgcacttggagcccactgagcctggaagacggggatccctgcttctcagcctgcgggcaacagggcagggatgggtggggcccgctttctccatttcaggtggcgtctgctgtgactcatggtgttggctcctcttgtccctcccctccttccctgtcaggatgcgcaggtcccacagaagatgagctgtccctgcccgagggacccagcgtccccagcagctccctaccccagactccggagcaggagaagttcctccgccaccactttgagacactgactgagtccccctgcagaggtagggccctgcctcacccacacctgccgaggccgtctgtgcagcctgggcacagcattggcgtccctggagttggctccccagcagggccaggagggtgagtggagagcaactgcttcgttttttttgagacggagtctcgctctgttgccaggctggagtgcggtggcccaatcttggctcactgcaacctccgactccctggttcaagcaattctcctgcctcagcctcctgagtagctgggattataggcatccacaaccacgccctgctaattttttgtatttttagtagagatgaggtttcaccat[138 bp omitted]cccactgcccctgctcgtaccctgtgtctgtacataagggtttctggggagtgccccgctgggctgtgggctggcctagggccagggctgctcggcgggaagggttatgagggtcccctcgggatcttcccctagagctcttccccgcagctctgggagacgtggaggcctctgaagctgaagaccacttcttcaacccacgcctgagtatctccacgcagttcctctcaagcctccagaaggcatccaggtagaagctggccaagcactgcccaccctctggctcctcaacagtgccccagggcaggctgaatgagaatcatcccccctgctctcctccccacaggttcacccataccttccctccccgggcaacccagtgccttgtgaagtctccagaggtcaagctcatggaccgaggcggaagccagcccagagcaggtactggctacgcctccccagacaggacccacgtgagtattgggcccacctccgtcagggcacggggctgggaaccctgaggccttgtcctcacctcagagctgtgcctgcaggtcctcgctgcagggaaggctgaagagaccctggaggcctggcgcccaccacgtgagtgccccagtcccagacggacagtcctgggtttctcggcgagtggccggatgtccagcctagctgtggggcgtgggggccctagccatcagttctgtgtggtggagtcagtgccatctgcttccgttacagctccctgccttacgagcctggcgtcctgtgtccctgcttcctccgtgctgcccacagacaggaatctcccaacgcccacatctgcacccaccccaggcctggctcagggtgtccatgccccctccacctgttcctacatggaggccactgccagctcccgtgccaggatatcacgcagcatctccctcggtgacagtgagggccctatcgtggccacactggcccagcccctccgtaggccatcgtccgttggggagctggcctccttgggccaggagcttcaggccatcaccaccgcgacaacacccagtttggacagtgagggccaagagcctgccctgcgttcctggggcaaccacgaggcccgggccaacctgagactgaccctgtcaagtgcctgtgatgggctcctgcagccccccgtggatacccagcctggcgtcaccgtccctgcagtgagcttcccagcccctagccctgtggaagagagcgccctgaggctccacggctctgcctttcgcccaagtctcccagctcctgagtcccctggccttcctgcccaccccagtaacccccagcttccagaggcccggcctggcatccctggcggcactgcctccctcctggagcccacctccggtgagtacagccctggagcaaggactgtcccctaagctcatcctgtgtgctagttggctcagctccaaagatggatacttgacctggccacagggactgtgccattcattcattcgtgcattaacttaaatatttaatgagcattacatgttgggctttgtgctaaaccctgggacatgggacatggtggtaaacaacacagagaactgacagcttcaatggggacaatgcccagactaaacctttaaggaacccgtcatatgtatcacgaagtgacacatgcttaggagggacagaggagggcgagggagtgcagggtggggacaggggttgggattacaaaccagaagataagaagaggcttcagggaggaggctgcattggagcagagacctgtaggagtgaaggggagggagccttggggacccagagaagtgttccagacagaagtacagcatggagtccacccagtcgctctggccgctcacaccaatggaatgcagctcatcttgctcattcccttctctctaccccaggtgcacttggtctgttacagggcagccctgcccgctggagtgagccctgggtgccggttgaagccctgcccccatctccccttgagctgagcagggtggggaacatcttgcacaggctgcagaccaccttccaagaagccctcgacctttaccgtgtggtgagctaagccccagagttgggaaagggttgaggggtctcttgagaccgcccggccttggtggcccctgacaaggctggcatcccttgcagttggtctccagtggccaggtggacaccgggcagcagcaggcacggactgagctggtctccaccttcctgtggatccacagccagctggaggctgaatgcctggtggggactagtgtggccccagcccaggctctgcccagcccaggacccccgtccccaccgacgctgtaccccctggccagcccagacctgcaggccctgctggaacactactcggagctgctggtgcaggccgtgcggaggaaggcacgggggcactgagggcgcagcccctccaccgcagccctgctgcttctgaggacttaggtattttaagcgaataaactgacagctttgaggaatggttcctggtgtctgtttgggcctatccacaaagccctcttcaagtggaagtggggagggagggtagaaggtgatgcccagaggactcgtgtctgtcagtggagagcatgggaccagcgctcccaagaagttcaggaactgcagccatgacctcagggccagtcctcccacactgcccacagagctgccacagaccagtgtgaggtgcttacccagtggggcccatttgtgccccagggaggagccagaccctcttacctgccccctgccagtgcctgagaactcactggggctgctgtgatcaccatgtgcctaccttgcccagcagtccacgctttgccatatcatggctcagggcctctgggccaaggccacactagatcccacaaagtccacggtggtggtgtccccatctgcaacaggggaaactgaggacccatgaacaggcttgcccaagctgggtatggtggcctgcacctataatcccggctactcaggaggctgaggtgggaggatcgcttgaggccaggagtttgagaccagcctgggcaacttggtgaaaccccatctctttatttcatgtatttatttatttatttttgtttttgagatggaatcttgctgtgtcatccaggctagagtgcagtggtgcgatcttggctcactgcaacctccgcctcccgggttcaagcgattctcctgcctcagcctcccgagtagctgggattacaggcacccaccaccatactcagctgatttttgtatttttagtagagacggggttttgccatgttggccaggctggtctcaaactcctgaccttgggagatccgcccacctcggcctcccaaagtgctgggattacaggcatgagccaccgcacctggccaaaaccccgtctctttaaataaaacaaaataaaacaagaaacccaggcaggcttgcccactgtatgatcctggcagcaggcccaggccacgagcagctgggaccaataactgcttccccttcagaagttctacattccacgagctcccagcactgctaccagctcccccagacagcaggcatctggccacatggggtgtctgctaaaaaagccactcttggctggggtgtggtggtgcacacctgtagtcccagctactcaggaggttgaggcaggagaatcgctcaaacccaggaggcagaggtttcagtgagctgagatcacaccatcattgtacttcagcctgggtgacacagcaagtctcaaaaaaaaaaaaaaaaaaaatcctgccagttcccacccaggtgccgggcactgtagcagaaggaacatcaggcaacgcacctgccctcatggccactcaccttctatacagtcaaacagatgcaggaattagagctctgtataattctagataggttggggagatccattgctggtgaagggtcagggaaggcctttcgaggtgacatttgggctgaagcttgatagaggacatctcaggaacacatccaggccgacagcacagccagtgcacaggcctggggcagccacacgtgatctgtgtggaagcaagaggagcgaagcccggacggctggaatggagtgagcaaggggagggcaggagctgaggtgcaaggaggagcagggccttgttgcttcataacatttaagtccaaggaatatccagaacagttttttgtttttgggtttgtttctaaatctctgctcttaatgtttgggggatatccagtgttgcttatttctcacgactctgcctcagggagtccaggtggtccagaacttgaaccacctgcctaggcctaggcccatctgcctagttcggccaccattgcccaaaaccttgcccaacatccctgggcaaagcttggtgttcagccccccaggcctcggacacccaggagaccaccttgggcctctgtcatgcatggaattacccttccttccaacctgtatcatagtaaagtcttctgctccaaggagtaaacacctggctttcagggcccaagatggagggacgttggttacccttgatgtcatcatgcacctggcctcttcctctcctgctctgttatcctctgtgagcaagcttcagtctccagcttatggcctcatggttgcaacacggctgctgtggcacccagcagcacaccctcaggtggtgtctccattttgcaattgttggctttcctgcagccctgactgaagtgcctggcataagcctggaagcgcaggagctagaagctgccccgatagtactgctatggggaggctgaggttagatgtggagtgcagggggctcacagagggtgacagcaggagaggaagaggccaggtgcacaatgacatgagggtcagaggcccaagttattggtcccagctgctgggtggcctggtccaaccaggagcaaaggcacagagcagggcaccctctagggcagcagaaaagatgcagatctctcccaggggtctccctgggagactcatctggggtcagatgagtcccaggcaacaggaatggagattgctttgatgtgcttggaccatctctcctgtcctgggcatgttgcagctcaaacaaagaggttctctcaataagaaaggcaagtgggctggtaatcagagaggatccagcatgtctgccacttccctcttccaaatgccaggctctgtcctggaaggaccatactttctccatacttcttaaccaggataaaccacctggttaagaagccactgctggtggtgcagcatgtgtgcatgtggtttgtgagctgacagggtcccagcagaaagatgacagcatgcttagatgggatattccaaagagtttaaccaagggatcatttgcaaaggagcagcagggactgggaaaccaccgaggctggtgcagaaccccaggactggcaccctgggagctgttaccacccccaggccacaaggcacaaagagaaggaacaagaacccaaaagagcaaatcccagggagagggtagtgctgagggagctgcagccctgactcccacacaggacggagtgagaatcaacaccctgaccttactcccctcctgcagggcaccccattgtccaaatcctactggaagccagagtgcatagaagcccaggtgaccccgcctccagtcaacctcctaggccatggagcagggcagaacaggactgagagggttcctggggaactgggtccctggaaggaaaacagttcatctttcactgcaactccccccctgcttctacccccacatctacccttggcctccccatagcagtaccatcaggacagctcctgggtcctgagctgccaggcccgtgccaggcatcccagtcagggctgcaggaaagccaacaattgcaaaatggagacaccacctgaaaccccattttgcagatgacccacctgaggcctggatgtttgcccagaggagggattcctcggcaggatgcagtggctcattcctgtaatcccaacactttgggaggccaaggcaggcagacggtttgagctcaggagttcaaaaccagccctaggcaacatagcaagactccacctctacaaaaaattttaaaattagctaggtgtggtggtgcacgcctgtagtcccagctacttgggaggttgatgtgggaggatcacttgagcccaggagcttgaggctacagtgagctgtgttcactccactgcactccagcctaggtgacaaagcaaggccctgtctcaaaaaaaaaaaaaaaaaaaaaccttcctaaccaatccctgcttatatgtctgccacatgccaggccccatgctaagcattctctccatgtgagctacatggatcttcaatacaaactgggaagagggagattccttagtctcattttccaggtgaagaaaccgaggcccaatgagaaatgacttgctctgggtcctgcagagagcaagcggaaatgcatggccagcagaccctcagcactgccacccttgcttccccaaatgaattggcacaactgactctcgggcaatgtaaagaaatgaagaaatactcctctcaccagcaagccttgtacagatgtccccctctgactagaacaccctcccctttcatctgaaacctttcagcgcttatccaggaagccatccctgtacccgtagcctggatcaggagcctgttcgggtccccaggtacccctcttttccccatcatggctgggtctctgcctcacttgcctctcactgtcttggtcattctgggctgtcactggtgtgcctccttcatggacttacgcgatcattt[134 bp omitted]acatggtgaaaccctatctctactaaaaatacaaaaattagccgggtgtggtggtgcgcacctgtagtcccagctacttgggggactgaggcagcagaatcgcttgaacccaggagacggaggctgcagtgtgtggagatcgtaccactgcactccagcctgggcaacagagtgagaatct[144 bp omitted]gtgaaaccccatctctacaaaaaacacaaaaaatcagctgggtgcagtggtgtgcccctgtaatcccagctacttggaaggctgaggcaggagactcacttgaacccaggaggcggaggtcatagaggagccaagatcacgccattgcactccagcctgggcaacgagcaaaactccgcctcaaaaaaaaaaaattaaaaaacagagcttggattgcttcttagtcttctggctaagaatcaagtgtaaaacagcttggccagtgtgccggggtagggtcctgggagcccctggctgtgtcaagagaccccctttgggccaggtgcggtggctcatgcctgtaatcccagcactttgggaggccaaggcaggcggatcacttgacgtcaggagttcaagactagcctggccaacatggtgaaactctgtctctaccaaaaatacaaaaattagcccggtgtggtggtgcatgcctgtagtcccagctactcaggaggctgaggcaggagaatcgtttgaacccgggaggtggaggttccagtgagccaagatggtgccactgcactccagcctgggcaacaagagtgaaactccgtctcaaaaaaagaaaaaaaaataggagacccccttttactttccagactgtgggagggaggaagagtgttgtcccaggcagtaactaggggctagattattaacaaactagtattttagtgcctgctacacctgaacagtgcttctggctgaatgttagccctgggaatctgaagatcagagaggtggggcatcctacctgaggatgcacagcctggatcctcattttgccctgatttatccagatctgctgtcctccctgcaccctacagagcagggcaatcacagcagggggccccttcagtgtcctcagacagctgctgtgatttgaataaccaggcaggctgctggatgtcccctggtgactgatttgcctggcaaacagaccctcaacccctgggagacagtccccctggggccttgtttcttcttcctatcctcaaaagctccccaggcccatctccccttgcctggctctgcttggtggtcctagtgcttgtccacccctggaggctggatggttccctccaaaacctgggagaagatgggcaggtccccaggcaggggtaacctgagccagcttagtccactcccagggccagccaggaaatttgcatgaagagaatgaggttcctcagaggcttcccctcctttcccaccagggatagtcatcctggggctgaggtctgacagcaggtggaagcagcccctgtgtgtggagagccttccggagggcatgccccgcgccttcctggtcaggagtcggcgtccacagccccccaactggggccatctgcctgaccagctccggggagatgcctatatcccaggtgggcccctcactgtgcctggaggtaaggggcaggagagacgcagtgtcaccatctggcttttctcctcagactgcagcagcctgggggggccaccggcacaacagtcgtccagtgtcagggatccgtggacagcggtgagtgtgtaactggctagcaaagccagctgtttcgctcctgcctgctctcagccttaatgaagctgacagccccttgctcccccgacccatctgcacacgccctccagcctcgggacctgtccgcccctacttctctgtgttgggaatgcctctcctttcctagtagtgagctctctactgttaggtctcaccccaggcaccagggccggcagccacagggatctcttccagcggggcacaagattcatccccacatgtggatgatccgctttatgtcagaacatgggacaaggcaacaggagtgcgatgggagataagggctttttcagctgtgcatgcattggaggaaggaaagcgccagccggaatgtaatatattcatgaaagcaaggcactgttctaggcatgggctgttatattcagcgggaataagacaaaaatccacaattttatggagcttatattctggttggggctgcatgtatagacaataaaattagtcagcctgtaattccagcactttgggaggccgaggcgggtgaatcacttgaggtcatgagttcgagaccaggctggccaacatgttgaaaccttgtctctactaaaattacaaacattagccagacatggtggcacgtgcctgtaatcccagctcctcaggaggctgaggcaggagaatcagttgaacctaggaggcagggcagaggatgcagtgagccgagtctgcgccactgcactccagcctgggaaacagatctagactccatcccccctcaaaaaaaacaataaaattagaaaaatagaccgggcatagtggctcatgcctgtaatcccagcactttgtgaggccaaggtgggtggattgcttgaggtcaggaattcaagaccagcctggccaacatggtgaaaccccatctctacaaaaaataaaaaaattaactgggcatgtggcgcatgcctacaatcgtgtaatcgtggggaggctgaggcactagaatcgcttgaacccgggaggcggaggttgcagtgacctgacatcataccacttcactcctgcctgggcgacagagcaagactctgtctttaaaaaaaaaaaatgtgtatgtcacatcagaagatgggacttggcatagagaaagtaaggaccatgggatagtgagggaaggccctggagagtgacaggcacacacactaatcactgtctcccacctgccttcctaatcctccgtggtggctcaggacactctgtaaatactcatttgcagagtaacaaagggtggatggggtccagccagagaggctaataactcctgcatccctccagcagcccacacagggcaacctgacctctgctcccaggggccctgggacgctgggctgcccgctctgccctaaggccttccctctgcagcgcatgctgacaaggcacctcaagtgccacagccccgtgcgccgccacctgtgccgctgttgtggcaagggctttcatgacgccttcgatctcaagcgccacatgaggactcacactggtgagcagtggcagggacagggaaaagttgctgggccccaggtggggatggaaggaaatggagagaggtgctgggctgtggagtgtccatggtttgtgtatgtggggtatggagaatcaagacatgatgtctctcggaccccagtgggtgggtgtaaggtggcaccaaaataggggcctgtcacggaatgcagagtgcagacggatgccggttatacgattcaggctccagatcgaaaggcaagggaaggcctccctctccatcccccaggggagggagcatcctggtgagggagagtggagacacaggtgtctggcccatgtctgcactgggtgacggtagcagatggtgggtcatgggcggaagagtctgaagagcttggaataggtaccagaaatgctcaacactggaaagcagggtgggggcgctttagtccagagcccattgccctctctgtccagccctcccctctgcgcccatctgtgcagggatccggcccttccgctgcagtgcttgcgggaaagcgtttacgcagcgctgctccctggaagctcaccttgctaaggtgcatggacagccggccagctacgcttaccgtgagcgccgcgagaagctgcacgtgtgcgaggactgcggcttcaccagctcccggcccgacacctacgcacagcaccgcgccctgcaccgcgcagcctgatacggtgtgccagcgtcctccccacgaggcaaataaacacagaaaactcacgcatggaatctggtgtttattacactcgggggagagaggaggtcactcggtccagcggtggccgcagtgtggggctgtgcacacgtagtaaaggcgcatggcgtcctggcagaaatgatgcatggttaggaaggatttggacccagcagcgccttaccccaaaagaacaggcaagagaacttcaccaataggtaagggcccggcagagttccaagaagcgcagggtcacccacattgatatccccgcccccagaaaggaccaaacaagccccagatacttagaaagccctcgcgccacttacctcggcccgcgcactgtgtgactggaagaacacagcctccttgtggccgcacctgagagggtaggggctcggtcaccggaggcttcacacccttccctcctcccttcgcccagtgaggagacgagcctcactttacctccccagtaccagctgaacgctcacttttggcacgggtggtcctcggtccgcggcaacgtggggtcctgggacacgtcggcgataatctgggtcagttcgctgcagggacgcgggggtgcaaaattacgctcagacccagcctccagagccaacacccccgcccccagctcagggcccgccactcactccacttcgtgcgtgatcttgttgacatagatgcagctgttgtcggcctcctgctggtaatcacagttccggcactacgagagggcgagtgtgggggaaagggggtcacggaaggattccagacaagattgggaggagagggcagggtgatcccggaggatatgacgacaggactctctttggggatgggcaggacatgagagtcaggatcacttgaggtgcagcggagggcgaacagggagtccgatcacagaggcagggggcagggcggggccacgctgggaacaggtggacctgccggggaagaccccggcgctcaccgcgtagagcagaatgcggttctccttgtcttccttggggtacagcatgttgttactgtggggagggggaggtgccaggggttagttctggagccattcctcgcccgccttctaacatcacccgctccctccgcctcaccattcctggcagaagcgaatacccacgaagcccggctcgtaagtcccgtcgggctccatggcgacgcgcagcccgcgcagccctcccagccttccgcgcttgctccgccgcgctacaggtcgcgggaggggccaggcctaggtgcttcgccaaaagagggcggagctgcgcacacgtgctggctccccgccgcctcgggctcggctctctccgcgcagaggtttcatggcttgcttcaatcttttgatatcttagagtaattgcttccaatttttgggcatcgccgcctcagtttacagaatagtatggatctggtgccagagccgggaaaacgatgcgcatcgtaaaccgcaaaacactgagcatccaggacagaagccaaggcgcttggcttggttgaaggccagtgcgcatgcgcgagtttacccttcgcggactgggcgagctcttgccactcctacctccgggcttcagtcttcgccgcctgttctggtcctttcccgggccgctattggaagaaccgtgaactatggaaggcccctctggattggctgggctggcccaagagtaaggagagccctcttcctggcggtggggaagggacggcggcgattggcggacgctcctggcaggagagcgcggattggtcaggcacggagcaggaggcggggctgatagcccagcagcagcagcggcggcggcggctgcggagcgggtgtgaggcggctggaccgcgctgcaggcatccgcagggcgcggcaagatggaggtgacgggggtgtcggcacccacggtgaccgttttcatcagcagctccctcaacaccttccgctccgagaagcgatacagccgcagcctcaccatcgctgagttcaaggtgtggccatgggggcggggtccggaggggcggggcgaagaaattggggggttcccggaagggggaggctgggaggggccggggagtgactgggcgggcccggaggtgatcccaggctgcggaggctggggacccggtcgcggcggggcgggtccggagagaactcgagagtgcagagatgagggccgggtccagcgaaaaatccgacggtccagagggcgggggcaagaggcgaggggctggattgcggccccgtgcgtcctgactggggggtcttttggaggaaaagggacgtggcgatggtcattgatgcaaggggcggggcctccgtggcctccttcttctcaccctgcctcctcctcacagtgtaaactggagttgctggtgggcagccctgcttcctgcatggaactggagctgtatggagttgacgacaagttctacagcaagctggatcaagaggatgcgctcctgggctcctaccctgtagatgacggctgccgcatccacgtgaggactctctatctgggacactcccccaccccacctttcatttggttattcaacagacacttgctgggctttgccctcagtcatacccgagataggtcctgccttcgtggagcctccagtgcagcctgacgagagacagacccatcattagacagggacagcctagagtggtctgggctgggatcaggaaatcccaggggactggagccaccaagaagaggtgcctgactccacctgggagaatcagagagggcttcctggaggaagggatgtctgagctgagggatgaggaaagggtgacttaagagaaagaggtggaaaggagggagcagggtgtacagaggcctagaatgtgaggtaggtcacagtgagcgaccaggctggacagcttgggagaaaccagaacacaggatctctttgtgcatccactcagtacatcctttctgtctttttttgagacagagtctcactctgtcacccaacctggaatggagtgcagtggcactatcgggctcactgcagccttcacctcctgggttcaagtgatccttgtgccccagcctcccgagtagctgggattacaggtgcccacccagctaatttttgtatttttagtagagatgggtttttgccatgttggccaggctggtctggaactcctgacctcaagtgatcagctcaccttggcctactaaagtgctgggattacaggcgtgagccaccaagcccagcccctttctgtccttattccctcccgacctcactcagtctgtagcagccacattgctccttgcacagtccaggtgagctcggcctctggatcctgggcctgaatggttcttttgtcatatgcctgcgtgcctcacccttccttcctgtcttaatttaaagtgtcagtattctagtgaagtcttcaccggcctcagtgttaacgtttacctcattcctttccccttctttgctttattttagatttttgtgtttacaagtaattctcctctgacacactctggatttctctcatctggtttatttactctctgtctccctggattcgagtgccctgagggtggaaattttgatcactataattcactactgtgtccccagtacttggaatagtgcctgggacagggaggatagtccgtgaatcgttttttgttttgttttgttcgagacagagttttgcccttgttccccaggccggaatgcagtggtgtgatctcagctcactgcaacctctgtctcctgggttcaagctattctcctgcctcagcctcccaagtagctgggattacaggtgtgcaccaccacgcctggctaattttgtaattttgtattttaagtagagttggggtttcaccatgttggccaggctggtcttgaactcctgacctcaagtgatctgcccacctcagcctcgcaaagtgctgggattacaggcatgagccaccacgcccagccctgtgaatcattgttgaatgatgaattgaatccataaagtaagaccacaaggataatgtaattatccccattttgcagaagagaaaatttagcttcagggtggagtttatttatttattttttattttttttgagacagagtcttgctctgtctcccaggctggcgtgcagtggcatgatctcggctcactgcaacctccgcctccccggttcaagcgattctcctgcctcagcctcccgagtaggtgggattacagatgcccgccactacaccagggtaatttttgtatttttagtagagacggggtttcaccatgttagtcagactggtctcgaactcctgacctcaggtaatccgcccacctcggcctcccaaagtgctgggattacaggcatgagccaccgcacccggcccagaatctactttcttaaggatgaactgtcagtagcattttggccccagtctacatgactctagagagaactgcttcttttttctctcgttgattaactgttcattccccatctgtgttgtgccaggggtttcattatgactgcatctgagaagttctagtgtatgaggcagatgttggctaaatggccagaggactgaatgtgaagggtcaggggagacaagggttgtgtaggagatcatgaagctgggagaccctatcctggggtacctgatgcatcagtgacgtctgggaggacatcctggaggtggtgctgctggagcagagacgagaagaataaaaagaattggtcgggcatggtggttcacgcctgtaatcccagtgccttgggaggctgaggtggacagatcacttaaggtcaggagttcgagacggtgaaaccccgtctctcctaaaaatacagaaattagctgggcgtggtggcagatgcctgtaatcctagctactcaggaggctgaggcaggaggatcacttgaacccaggagctggaagttgcagtgagctgagatcacaccactgcactccagtttggatgatagagtgagatcctatctttaaaaaaaaaaaaaaaaaaaaggttaactgaagatggggaaggggtgccctaggagtggggcacaacccagcaaacactccaaggtgggagggagcgcggtggggattaagacaggccacttctgtggccaaacactgtggaagctggggaggaccctgacctggctcaggtgttcacaggccccctctggctgtgtgtggggaacaggtggtggaggacaggaagagtagggagaccaggaaggggctgctgtgagagtcctgatgaggggacgaggtctggagctgtgggtcaggcctctgctgggtgcacaggactgagcctttgggccaccctgggcagctgaagctaaggggtgcgggtgttcataggcacctcataggcagtggcatctttgagcaggtttcataacaggcggttcaggtacacacagacctcccaggccactcaaggaaggtgttccagagtggagccactggggaatttttacattttctaaaattctttttctctttataaatatcacccatattcattgtttaaaataacagaacttcaaatttgtgaaaattctcaacagaaattctcagtgacgcttcatccggaggtaaaggccattcctattttgccatgttagcccagtggcttaggccagacacctcagggtgttccttgggcccgctctctccctcacccccacatccactctcatcaaatcctctcggctccacctacaaaaacttccctgaccctggtccagcctccatccttcccccaacctcgccatcccggcagcttcctccctggcctccccgctccccatctcagccagagggagcctgggaccacctgagtcaggccagggccctcctagctcagagccctgccctggtggcacttcgctccagataaaaaccaaagtctaggccaggtgcggtggatcgtgcctgtaatcccacccagtacattgggaggctgaggtgggaagatcacttgaggtcaggagttctagaccagcctgaccagcatggcaaaatgtcgtctctacttaaaaatacaaaaattagccgggtgtggtggtgtgtgcctatagtttcagctgcccgggaggctgaggcaggagaatcacttgaatttgcagtgaggcagaggtttccgtgagctgagatcacaccaccacactccagcctgggtgacagagcgagactccgtcaaaaaaaaaaaaaaaacccaaagtctccagcagtcccttgtgtcttccactctccctctggctcgctccaccccacccgcaccacccactctagagcgtgaaggacatttctacctctggccgtctgcacctgccgttcttgctcatctttccagccttggctgaaacatcccctcttttgggaagcctaccctcccatgctccttaagcctcttccctgtcatatttttctccatagccatcctccagtgtttcataggtacctgttcctttgtttgtggttggccttctccctgcacaatgagcacagcctgagggcagagtgcgtctgtgtttacactgagtccccagcatgaggcccagctgggcccctgggagctcggaaaccaatgaatgaatgaatagtgggggcagaacaggaagagatgctctggggcctgaggttggggccagcttaggagagtcccagaggcccatcgaggagatgcgctgtgcacagggctgtgggcaaggcctgagctctgccggttggactctgtgactttggggcccttggcgatgttgatgccagcaagcggggaacttctggggacagaggcagcctctgggagcttggatgggggtgaggaaggggaggtggccagtgtacgtagctacttctcccttccgctgggctcaggagagaagagaaggctgcagtacaggcgagggagggagatgcgtttttcccagatggagacactgaagtccctgcacccagcacccaggcctccctggccagaccctgatccccacggagcccctcccctcacacaggtcattgaccacagtggcgcccgccttggtgagtatgaggacgtgtcccgggtggagaagtacacgatctcacaagaagcctacgaccagaggcaaggtacgggcaggtgggcgtcgaggggtgcgtgggggccagagggagtatgtgcaggtatgagggcgggcaggttagacagggcccctgcagggaggccagtggtgtagacggggggccgagagcttgggaggatataggggtgaggctgggagtggggacagacggaggcctggggtgggaatgagggccgggaggtgtcaggggtatgggcagtcagacgtggtcgggggagggctgggaaagtggagggagttgaggggtaggtgtgggggctgggtgttgtcagggtcagatgggggcatggggcggtcggacggggtgtggagggcaggacaggtggaatgcgagtggacagggtggcggtcagtgagggcgcctgggacggatcgagtgttgggggagaccgggggcctcagggccggaggagggcggaggaggaaggcggatgatgaaggcagatgtgcgctgaaggggtgagagaccatgggtcctgtagtgaggggtgcaggcggcaccccttccatttacgattgtggagttggggggcctaggagtcctgggagaggctaaggctgtggtgggagacctggggcttgggtgacagccctttgtcacctggaagagagagttcctccgtgaacgtgggcccctcgtgggtggagcgtcatcctgttaggcccggccgacaccccaactgaccccagccccctctgcccacagacacggtccgctctttcctgaagcgcagcaagctcggccggtacaacgaggaggagcgggctcagcaggaggccgaggccgcccagcgcctggccgaggagaaggcccaggccagctccatccccgtgggcagccgctgtgaggtgcgggcggcgggacaatcccctcgccggggcaccgtcatgtatgtaggtgcgtggctcgcgggcccggtcccgggctccagggctccaaggccgggaggaaatgttgggggcacagtggagcctcggagaccacgctctgcctaggggcgcggggttgggggggactcgaaacgatctcagtccctggaggtgacggaaccatctgccgacactgacggcccagagtgtttgtggagggaagtgggaggcgcaggcggagtgatctgtccagcgagggaggaagcagaagccagaggcacgcggcctgtgcgcttcgaagcgtggggcagtgtcagtcgcggtggggaaacgggcggcgtgaccaaggcaggagtgagggaacacagggggctgtgtgagcccagaggaagcacctggaggctgggagcatctgaaggaaaggaggcagcagccaggtgaaaagggaggaagagttcccgccagaaggagtagcgggtgcaggtgagcagagcgcaggaggtccacctggggaaggggagcgggaggagaggggagaagtgtagtcaggggcatgggcagggcggcgtcacagtggagagcagtgtggatttttttaaaaagaacaggctaggcatgatggctcacgcctgtaaactcagcactttgggagaacaaggtgggaggcttgcttgagccccggagttggaggttacagtgagctatgattgtgtcattgcaccctagcctgggc[132 bp omitted]gagaccctgtctctacaaaaaaaaaaaaaaaaaaatcccacaaaacttttgtcagttgtggtggtgagcacctataggtgccccagctacttgggaggctgaggtgggaggatggcttgagcccgggagttgaggctgcagtgagctatgatcgcaccactgcactgcagcctgggtgacagagggagaccctgtctccaaaaaaaaaaaaaaaaaaagatacacggggtacatatatgtattgttacatgggtgtgttgcctgctagtgggtggggaccgggcttctagtgtacccatgacccaaattgtgaacatcgtacccaacagataatttttcaaccctcaccaccctcctgtttctggcatccccactgtctggtatttccgtctttatgcctgtgtgtacccatcccccagtcgtcttcagccactaatttacgtctgtctctaatttgccgattctggatgtttcataggaataggatcatgcagtctgtggccttttgtaactggcgccttccactgagcagaatgctttcaagtttcatccgtggcatgcctgtgtcagtgccacactgttgccaaatagtcctgcattgagcgcctagaccacagtgtatccagtcaccagttagtggacattagggtcatttccactttttggctattatgaataatgctgctatgaaccttcttcttttttttttttttttttttctaatttgagacagcatctggctattgcccaggctggaatgcagtggcacaatctcggccatttcagccttaacctcttgggctcaagccatcctcccacctcggcctcctgagtagctgggaatacaggtactcatcaccacccccggctaaagttttgtggttttttttgtaggatgggatttcgccatgtggcccaggctggtctcaaactcttcccgctcaagtgatcgtcctgcttcagcctcccaaagtgctgggattacaggtgtgagccaccatgctaggcctgaacattcttttataaatttctgtgtggctgggcatggtggctcatgcctgtaattccagcactttgggaggccaaggtgggcagatcacctgagatcaggaattttgagaccagcctggccaacatggtgaaaccccatctctactaaaaattcaaaaattaactgggcgtggtggcgggtgcctgtgatcgcagctacccggaaggctgaggcaggagaatcgcttgagcctgggaggcggaggttgcagtgagccaagatcacaccactgcactccagcctgggcaaccatgcaagactccatctcaaaaaataaaaaatacatttttatgtggacatttgttttcatttctctgtgcctaggagtggaatccctgggccacatggtaacactgtgcttgacttttttgaggacctgccacactgcttcccacagccgctgcagcagttttcattcccgccagcagtgcagaagggtcccattttgtcctcatcctcaccagcactttagtctgtcttttgcttacagtcatccactgggtgtgaagtggaacatcatcatggttttgatttgcacttctttggcagctaatgatgttgagcatctttgcatggccatttgtgtatcttctttggagaaatgtctattcagatcctttgccttttgttttttgacacacagtctcactccgtcacccaggctggagtgcagtggtgctctcagctcactgcatcctctgcctcccgggttcaagcaattctcatgcctcagcctcccgagtagctgggattataggtgagcgctacaacacctggctaatttctgtatttttagtagagacagggttttgccatgttggccaggctggtctcaaactcctggcctcaagtgatccacctgagctggtggatctcccaaagtgctaggattacaaacatgagccactgcgcccatcggtatgtcggggtttggttttgttttttttcttttgagacgtaatctcgctttgtgcccaggctggaatacagtggcatgatctcagctcgctcgttccaacctccgcctcccgggttcaaacggttctcctgcctcagcctcccgagtagctggaactacaggcgcccgccaccacacccggctaattttttgtatttttagtagagacggggcttcaccgtgttagc[132 bp omitted]catgatcgtggctcactgcagcctcaacttcctgttgcccactttgtaatgggattttttttttgcaaagtgggtgttctttgagttccttgtatattcttctgctcagtttttcattgggatgctgtcttttgtcgctgagttgtgtattagtttgctaacaaagtaccactcactgagcaacttaaagttatttctcacagtaatggaggctagaagttcaagatcaagctgtcagcaggttggatttattctgaagcctctctctctggcaaggcagtagtgccatcccccttaggtttttacaaagccctcactggctggtgtcttcacccagtgaatgggggacaggggtggaagcagggacaccagtgaagtggctaccatattagtcccggcaggagctggaggtggtcctagtggtagcaatagaggtagcaagaaatggttttcaccaagacaggcttctactcaatgggtaggcatggatccagggtgatcctgaaatttcatggggatttcttctatgtccagaagcttcacagggatttctcttctgttggcaggtctcacagatttcaagcctggctactggattggtgtccgctatgatgagccactggggaaaaatgatggcaggtaacaagaattcccactcaggtgtctgtgtgtgcatttgtgtgtaagtccatgcgtgctgcttgctgagctgcccatgccagcttctagagtggagccatgtgagggtcctctgaccacacccacccctatcctttcctgcagtgtgaatgggaaacgctacttcgaatgccaggccaagtatggcgcctttgtcaagccagcagtcgtgacggtgggggacttcccggaggaggactacgggttggacgagatatgacacctaaggaattcccctgcttcagctcctagctcagccactgactgcccctcctgtgtgtgcccatggcccttttctcctgaccccattttaattttattcattttttcctttgccattgatttttgagactcatgcattaaattcactagaaacccagaaagtatttagaggacttcatgatttggggacccactgggtaaatagtggcccttcggtatcaggggccagcctctgtctcctcatatcttgctgttcccccatcttctcatcattcccacctcatctgctgtagctaccaggaagaaagggaagggaagggaggggatatcctttgcctttaaaaatgatgtacagccagctgggcacggtggctcacgcctgtaatcccacactttgggaggccagggcgggtggatcacgaggtcaggagatcgagaccatcctggctaacacggtgaaaccctttctctactaaaaatacaaaaaaattagccgggcatggtggtgggtgctgtagtcccagctgctggggaggctgaggcaggagaatggcgagaacctgggaggcggagcttgcagtgagccaagatcatgccactgcactccagcctgggcgacagagcgagactgtctcaaaaaaaaagatgtacaactctggctggatgtggtggctcacacctataatcccagcactttgggaggccgaggcaggcggatcatgaggtcaggagatcgagaccatcctggctaacatggtgaaaccccatctctacaaaaaataaaaataaaaaaattagccaagcatggtggcgggcgcctgtagtcccagctactcaggaggctgaggcaggagaatggcgtgaacccgggaggcagagcttgcagtgagctgagatcacgccactgtactccagcctgggcaacagagcgagactccgtctcaaaaaaaaaaaaaaaaaaaaaaaaaaaagatgtacaactcagccaggcacagtggctcatgcctgtaatcccagcactttgggaggccgagctggcaggtcgcttaagcccaggagtttgagatcagcctggacaacatggtaaaacttcatctctacaaaaatgcaaaaaatgagtcaggtatggtggcgcatgcctgtagccccagctacttgggaggctgaggtgggagaatcacttaagcccagaaggtcaaggctacagcgagttatggcaccactgcattccagcctggatgacagagcaagaccctgtctcaaaaccaaaaaaaaagaaaagaggccaagcacggtggcccacgcctgtaatcccagcattttgggaggccgaggcgggagatcgagatcatcctggccaacatggtgaaaccctgactctactaaaaatacaaaaattagctgggtgtggtggcgcgtgcctgtaatcccagctactcaggaggctgaggcaggagaatggcttgaacccaggaggtggagattgcagtgagctgagatcgtgccacttcactccagcctggggacaagagtgagactccgtctcaaaaaaaagaaaaaaagccaggcatggtggcttatgcccataatcccagcactccgggaggccgaggagggcagaccacttgagttcaggagttcaagaccagcctgggcaacatggcaaaaaccctgtctctacaaaaaatacaacaacaacaaaaattagccgggtgtggtggcacgcacctgtagtcccagctacttggaaggctaggtggtaggatcacttgagccttgggaggtagaagctgcagtgagctgtgttcacaccactgcactccagcctgggtgacacagcgagactccatgccgtgacaccagcacgtggcgtgtcacattattaaggattatacagccaacagttactgggctggtttcctttaatcctcacagcaggccctgtccgcaagtctttcaccgtttcccgtcaacactccacctttcctgcccaaagtttggggttgggagggaattcccaggggttcccaggacttgggctcgcctcccagatcccgcaacctttgcgtgcctagcctcggcaatgaccgcccatctgccacgagggggcggcagcgcaccgttcagacgctgcgcccctggtgcattatgggtcgcgtagtctcaaaggtggcataagcatcctggaacgcaaacggcatttcccagaaaactacgcgacaatctgagcctggtcttgcccagagctggaagctgaggtctcgcccctgccggcgttgcgggggattgtgggatgtaggcatttggctccgcgctccgcgaagggcggtgcagcgcaggcgcgggcatccggtacagacagccgagcttaatctgaggcggggaaccagcgtcccgggggaggcgccgaagctgactttctggccgcagtggaagtgaggcgagcgagctcccttagtggctggagccggctgggcctccttcctgtcctcctgctttcctgcatctctacttgtccctttccccgggctcctggtccgctcccaagcctgttcaagcacgaggcgtttccatctaaaaaaagaaaagaaatctcttttgccgggcgagatgtcagagccccgggagcgaaagtgttggtaatgttagacagaatgagttcctcttcaaaaatctaacttccttgtcctttgctctatgaactgtccttcctgcagaaactgcccttaccggggaaactgcccctccccgccgctgcaacccataccccgcctctattagaaataggcaatcggaatcagcttagattgtgaggtccaaccctagccaacgggggttaaaaacccctgctctcctttattaggtgtgcttttggtacaggtctgggcagcacgcttctgcagaagtaaactttgccttgctaagaaacttttctccgagtgctggtctctctctgtggcaccaagaacttatttctaacagtaagaagaatttactgaggac[132 bp omitted]tacagtgaaaccccatctctactaaaatacaaaaaactaactgggcatgccagcatgtgcctgtagtcccagctacttgggaggctgaggcaggagaattgcttgaacccaggaggtggaggttgcagtgagctgacatcatgccactgcattccagcttgggtgacagaatgagactccatctcaaaaaaaaaaaaaaaaaaaaaaaatgaaggaaagaatgctgcaggccaggcagggtggctcacacctgtaatcccagcactttgggaggccgaggcaggcgaatcacctgaggttgggagttcaagaccagcctgaccaacatggagaaactactaaaaatacaaaattaggcgggcatggtggcccatacctataatcccagctacttgggaggctgagataggagaatcgcttgaacccaggaggcggaggttgtggcaagccaagatcacaccattgcactccagcctgggcaacaaaagcgaaactccatttcaaaaaaaaagagctgatttttttgtttgttttttagacagcgtcttgctctgttatccagcctgtgtgtgatcccggcggtgtgatctgagctcactgtagcctcaacttcccgggctcaagtgctcctcccacctcagtaggccccatgaatagctgagactacaggcacatgccaccacacccagctaatttctgtattatttgtagaggtggggtttcgccatgttgctcaggctggagtgcagtggcacaatctcggctcactgcagcctcaggctcctgggctcaagcaatcctcccacctcagtctcccaaagtgctgggattccaggtgtgagccactgcgcacggccaagaataaagattttaataaagtaatgtgaaattaacatgaaaagccaataaggaaactgggcaaatatttgaaaagacaatacataaaagaaacaccaatagccaaaaaaccatgaaagccaagttcacccccattcatatttgaagaatgttacataaaatattgagacaccaccttttgcctgtcaaatcaggaaagatgtttatttttattttttatttttgagacagggtctctctgtcatccaggctggagtatggggcacaatttcgtctcattgcaacctcaaactcctgggctccagcgatcctcccaccccagcctcccaagtagctaggagcacgggcacaccactatgcctggctaattttttcaaaacacttttttgtagagatggagtcttgctatgttgcccaaactggtctcaaactcctgagctcaagtgattctcccacttcagcctcccaaagtgctgggattataggcataagccgccatgccacaaaattttacaagaaaatttcagccagcatttgacaagattccaggggacatgaatgaaatacctaaagataaaagagttccttgaggccagttaaggtggctcatgcctgtaatcccaccactttgggaggccaaggcagtggatcacaaggtcaggagttcaagaccagcctggccaatatagtgaaaccctgttttactaaaaatacaaaaattagcctggcatagtggcgggcacctgtaatcccagctactcaggaggctgaggcaggagaatcgcttgaacttgggaggtagatgttgcagtgagctgagatcacagcaatgcactccagcctacagagcgagagacccctctcaaaaaaaaaaaaaaaaaaaaaggagttccttgacaaaagaaatgtggaatttgctgccttgaactaagttaaattagctgctttgttgcaggaattttcattaatatgctagtccatgataacctgtataaaaggatcctcttgggcattactttctgggttttttgtttgttttcagaaacagggtcttgctctgtcatccaggctggagtgtcatggtgtgatcatatatcatatctcactgcagcctcgaatttctgggctcaagctatcttccagcctgaacctcctgagtagctaggactgcaggtgtgtgccaccatgcccagctaattaaaaaacttatttttgtacagatgaggtctcattatgttgcctagagtggtctctattcctgggctcaagaaatcctcccctctcagcctcccaaagcactgagataacgtgtgtgccactgtgcttggcctgaattttttattttaaaatacattttgtgagctgtgcttagtaatgcacacctgtagtcctagctacttaagaggctgaggcaggggcatcgcttgagcctaggagtttgagaccagcctggacaacacaggaaaaccccatctttacaaataatcaaaaaattagccattactcgggaggctgaggcatgagaatcgcttgagcctgagaagttgagctgcagtgagctgtgattgcaccactgcactccagtctggctgggtgacagagcatgaccctgtctcaaaaaaaaaaaaaaaaggaaaaaaaattattcaacaacagttgttaaagcacaggaagggctgggcacggtggcttccgcctgtaatcccagcactttgggtggctgaggcaggcagatcacatgaggtcaggagttcaagaccagcctggccaaaatggtgaaaccccgtctctactaaaaacacaaaaattagctgggcgtggtggcccacacctgtaatcctagccactggagaggctgaagcatgagaatctcttgaactcgagaggcagaggttgcagtgagccaagatcacgccactgcactccagcctaggcaacagaacgagactccatctcaaaaaattaaaaaaattaaaaatagaataaggcacaggaaaggaaggctttattcagagccattacgatagagagaggggccacagtggcagggccttgcagtgagggagacaggttgggctcaactccaaatactgcatggggaagtgggaattcatagcccaggatcgggtggggcgcagtggattgaaagttactaagaggaaacatcaggggtaaggggggattctggctaaaccagcctaacaggattcttgctgaagacaggcccaggtgatcagacatcacataggggctggtggaggatgaggaacctaatcagatgttgaagatgggagagggttctcgataaactgacttagcagggttctttgctaaaactggatttgacaagggagtacacagatgagcctagcagaagattcagagacttgactagtttggccatgcaagaatttcttttttgttttgtttttttctgtttgttttgttcggctcactgcaacctccacctcctgggttcaagcgattctcttccctcagcctgtggagtagctggaattacaggtgcctgccaccacacccggtttgtgtgtgggtgtgtgtatttttagtagagatggggttttgccatgttggccaggctggtctcgaactcctgacctcaagagatccacccacctcagcctcccaaagtgctgggattacaggtgttgagccacctcgcccggcccaagcaaataatttttatcagggaattgactccaaagaaaaacaataggagaggaggtcctgcagggtcacagcccatacaagagtctggccgcaaggaagcctggtaagaggagagggaacagagcggtgctgacctgctgaagggaaggcagaggtcggacaggtacccggattagtcatcacataacaacttggcatcagccatgctctgccatctactgtgtggcctcaggcaagtgactcactctctctgaacatccacttcctctcatgttggtttctttctcagaggcttgtgagaggccttggcaagccatggccataaagcaatcactggctgggcatggtccctcacgcctgtaatcccagcacttttggggcaccgaggtgggaggatcacttgaggccaggagttcaagaccagcctgggcaacatagtgagacctggtccttacaaaaaataaaaaaatgattcaggtgtggtggtgcacacctgtagtcccagctactctggaggctaaggtgggaggatcccttgagcctaggattttgaggttgcagtgagctataattgtgccactgccctccagcctgggtaatgaagtgagaccctgtctcacttttttttttttttttttttgacatggagtcttgctctgtcaccaggctggagtccagtggtacgatcttggctcactgcaacctctgcctcccgggttcaagtgattctcgtgccacagtctcccgagtagctgggattacaggcactcaccaccacacccagctaatttttgtatttttagtagagacggggtttcaccatattggccaggctggtctccatctcctgacctagtgatccacccgccttggcctcccaaagtgctggaattacaggtgtgagccactgcacctggccaagaaaaaaatttcttgcttatacaaagtcagctgtgggtctgggtgactatcaagagcagaagtgctcgatgccagggctcggccctcttccttcatgtggcacctccaggtttgctcagctcctagtgtgacccgggcaggagaaaacagagcatggagcattctgcactgccttcccctgcgcccgccataaacacaaggtcttgctctgtccactgggctggagtgcaatggttgcactggtttttaaatgcttctacaaggagcatttaaagtgttctacatccaacacttctacttacattttattggccaaagtaagtcagataactcctgagttcagcagatcctgggagatggcggagggcattagtaatgcttgccctactgtctcactgctggtgctgaaaatccaatgagaaaatacacacaaaacatattcattcattcaacaaatgtttactgggcacctatgatgtgccaaccactgttctaggaactggatacatacctctgagtgagtacatagcagtgaacaagacatatagaaatcccagtccagccgggtgcagtggctcacacatgtaatcccagcactttgggaggccaagcggatggatcacctgaggtcaggagttcaagacaagcttggccaagatggtgaaacaccatctctactaaaaatacaaaaattagctgggcgtggtggcgggtgcctgtaatcccagctactcgagaggctgaggcagagaattgcttgaacccaggaggtggaggttgcagtgagccgagatcgagccactgcactccagcctaggcaacagagtgagactccgtctcaaaaaaaaaaaaaaatagaagtcccagtccgtggcaagctcacatactagcggaggagacagaaatctggatcaatatgtaaagtacacagggctgggcgtggtggctcatgcctgtaatctaagcactttgggaggctgaggtgggtggatcacctgaggtcaggagttcgagaccagcctggccaacatgatgaaaccttgtctctactaaaaatacaaacaaattagccgggtgtggtggtggacacctgtcatcccagctacttgggaggctgaggcaggagaatcgcttgaacccaggaggtggaggttgtagtgagctaagaccgtgccattgccctccagcctgagcaacaaaaatgaaactccatctcaataataataataataataataaaacaaaaaaaaaagtacacagtacgtgagcgggtgataaaagacaggaccttcccgtgatcactagatgtgtagacatgaaagatctgcttcccagacctggggctggagaaggtcttggtaagggagtggtggcctcatgtcttcatgtctgccctgagagaggctgtttggatgttgctgtgcttgcagggcctccatgctgagttttgtctctgttcagctgggaacatgcaggtgaccttgccaggcaggcatcttctcactttctccagggcgaagagatgagggcagggaggtgacaggacagatcactaggggtggctgtcatgagaactttaggctggagtgcagtggtgcaatcaaggctcactgcagcctctacctcctgggctcaagtgatcctcccacctcagcctcccgagtagctgggactacaggcacatgccaccatgcctggctagtttttggtattttttgtagagatggggtcttgccatgttgcccaggctggtctcaaactcctaggttcaagcgatcctcctgcctcagtctcccaaagtgctgggattccaggcatgagccaccgcacctggccctgttgtgagaacttctgactctttcctggagtggggtgcagccagggcagggctctgagcctacagggccctgacctgactcaggtggtctcaggcttcctctggctccacaagaggagcagacagcagggagcagacagaagggagcaggctgtggggtgtccaggtgggaaaggatggaggctgtggcagggtggggacagtggaggggaagagtttagtttctgtaggtggagccaataatatctgctgacaggttggagtgggtgtgaaggagagaggtgaaggaccaccccggagtgtttggcctcagtcactggaaggacagagctgccactgacctaggtggggaaggtagtgagggagcaggttctggaggaaggtcagaagctcagtttaggatatgtaaagcttaaaatgcctctaagggccaggtgcattggctcacacctgcaatcccagcactttgggaggctgaggcgggtggatcacgaggtcaagggattgggaccatcctggccaacatggtgaaaccccgtctctactaaaaaatacaaaaattagctgggcatggttgcgcatgcctgtagtcccagctactcgggaggctgaggcaggagaactgcttgaacctcagaggtggaggatgcagtgagccgagatcgcgccactgcactccagcctggtgacagagcaagactccgtctcaaaaaaagaaaagaaaaagaaaaaggaaaaaaaaagcctctgagatcttccatcctttcccatggaaatggtgaatatgatgcaggatgtaggagcctggagttcgcaggaggtgtctgggctggagatagaaatttgggggttagggttagggccaggtgcagtggctcacgcctgtaatcctagcactttgggaggctgaggtgggaggatcacttgagctcagagttcaagaccagcctgggcaacacagtaagacctcatctctacaaataattaaaaaagaaaaaagataaaggaaatttggatgtttgccgggcgtggtagcttgtgcctgtagcagtagctattcaggaggttgaggcaggaggaggattccttgaggccgggagttacaggctgcagtgagctacatcacatcactgcattccagtctgggtgacagaacccctgtctctaagaacaacacaaaaaactgggcgttggccgggtgctgtggctcatgcctgtaatcccagcactttgggaggccaaggcgggtggatcacaaggtcaggagatcgagaacatcctggttaacacggtgaaaccccgtctctactaaaaatacaaaaaattagccagcgtggtggcaggtgcctgtagtcccagctactctggaggctgaggcaggagaatggcgtgaacccgggaggcggagcttgcagcgagcagagatcgcgccactgcactccagcctgggcgacagagtgagactccatctcgaaagcaaaacaaaacaaaaaactgggcgttgatagcctagagacaggatttaagctgtgcatgtaggggaggcaccccatggcatgagtggtacagagaggaggatagagacctaacacctggggctgccgggaataaggggttgggggccagaactagatgacaatatggttacgattggcagtgagtgccatgagaaagtacaagtcattttgaaagcatataactggaagcctcacctagtctcaggttgggtggagacagggaggtctttctggaagagatgactcctgaggtgacacctgcagcctgagtagctacacaatcaggccagaaaaaaaaaggcagcaggggagttcctggccgagggcatgagggctggcagcaagtgagcctcgggagagggcagagagctggagcagtcagtctggcagggaggggtgtggtgagaagggaatctggattagtcatcaccaaaagatctgtgccaagcccgggttcagatctggttctgccaccctccgtgaccctgcctttcagaatctccattctctctcctgccctgcagacaaggcttgtgtagcagttaccttggcctggccccagcaaggcctcaggaaacatcagctgcaactagttttgtctgttgtgatgttgttatttgacctattatattaattatattattaacgcataagggtagtggttaaggatacaggctagggagagtgactgcttgggtttaacctcagagtcggtttacttatctgtaaaatggggataataaatagcatctatgtcacagggctgttaggagaacaagggaactgatggacgtcaagcacttggaggagtggttgatggttacttgtttttgtatcttttttttttttttgagacagtttcgctcttgttgcccaagctagagtgcaatggcacgatctcgagtcactgcaacctctgcctcccgggttcaagcgattctcctgcctcagcctcccgagtagctgggattacaggcacacgccaccacgcctggctgattttttgtatttttagtagaaacaggatttcaccat[137 bp omitted]tgaggaatacagctggcctcgaggctgagggaacagcatgagcacagacacagagctaatgggggcatttacaaagcatttatcaccaatttatttatttatttattggagacggagtttcactcttgttgcccaggctggagtgcaatggtgcaatcttggctcactgaaacctctgcctactgggttcaagcgattctcctgtctcagcctcccgagtagctgggattacaggtatgcaccaccacatccggctaattttgtattttttagtagagacagggtttctccatgttagtcagactggtctcgaactcccgacctcaggtgatctgcccgcctcagcatcccaaagtcctggggttattggcatgagccactgtgcccagtatttatttgagacagagtctcgctctgtcacccagattgtagtgcagtggcatgatctcggctcactgcaacccccgcctcctgggctctggtgatccccccacctcagtctctagagtagctgggactaggcgcatgccaccacattcagctaatttctgtattatttgtagagacaaggtctcactatattgcccaggctggagtcaaactcctgggctcaagagatcctcctgcctcagcctcccaaaatgcagggaatacaggcatgaaccacttcacccagccaccacttaagttttttttttaataatcagtattgctgcagatatcatttaattttgatagggggcctagtggtatggagcaacccatgttcccattttacagatgagaaaatcgctgctcaggaatatcaagccactcttttggggttgtgcagttattacagggcacagccaggattcaactcaagcctagccagcctgcagggtaggggataagagccagccagcctgcctgggggccagatttagctccccccgatgagtcctgaaaaagtactggactcccgtggctcatgcctgtaatcctagcactttggcaggccgaggcaggtggatcacctaagatcaggagtttgagaccagcctggccaacatggtgaaaccccgtctctactaaaaatacaaaaattagctgggtgtggtggtgcatgcctgtaatcccagctactcgggaggctgaggcaggagaatcgcttgaacctgggaggcagagactgcagtgagctgagatggcgccactgcaccccagcctgggcaacagagcaagacgctgtctcaaaacaaaaaaaaaaaaaaagaaaagaaaagaaaagaaaccaggctatgtaaaaatattattgtaaaaaattaaattaaatcaaaaaaaggccggtagcccatacctgtaatcccagtacctcacagtactttgggaggctgaggcaggaggacggcttgaggcccggagttcaagagcagcctgggcaacatagcgagacctccgtctctattatgtaaaaacaataatattttttaagtaaataaagaaaccaggccgtggccaaaggaatcttcctgtgtctggggccttctttagaggctagcatactgaggacactctttgggccagtccaggaaggaatgattctggtggcccctgactggggcgggggcgtggtaaggttcgcctgggaggcggcgcaggcgctgcctgcggtttgactgccatccgggctgctgcaggcactgggaaaggcaatccagcctcaatcctcgccacagacacgggcgactgtcccccagcgtgtgagtcaaaccatactccaggcctccaggaggtgtttgtcgcgacaacacctgcagagggcccgtgcggagtcccttagtgagcggaccgaaaaccgccaccctggaaggatattggcatgccctagggtgaaaattcacactacgacactcggggggtgggtcccctccgagttctcgtccgcgggtgcctccacccagacctgaggggtgtcgggaagacccccgcctaccgagtcagggcgggattaagacctccggcgctggaaacgcgtagggcggggcccagacctggatccagctagccgggcggtgtggggtgcgcatgcgcaatgtccgcttcggctctaggaccgcgcgggcgacagcagggccgcggtgcagtgtccgacccgagagttgcggcctgagtcaccggccccgccctccggagccggacgctgcgggaggcccgggagcggcagtggaaccgactcccagaactccggacgtgtgcggcggtaagcgcccggcccgtaccccctccgcaccccgcaactccgactttggcggcccccagacccggcgaaaccgtgaagtctcggcctcaggagccccccagatccatggtctcagattcgaaccctcagacctgttcgatctccttttatgccgtcccggggacccttctccaccctctgtctcatgatccaaaatacaggcccataggtttcagagataccctgtgaattcttccttggggtgtcctgaaccgcgatcgtagatctgtgcccccagttccagcggggaaccccattgtccgggaacccagagctcacagccacgatcttagacccgagcccacagagccagaggtgacactggaatcctgccgctgggaatacctaaattctcaagcccacatttgggatttcctaaaccccgccctggggccctttaggccgtggatgtttgctccgcgcccatgacctgccaaggacctctacattcaggctgggctctggatctcacattctagcgcccagacatgtcgggaacgccttacgccaacttggggtccccaccaagagaacccccaccagatctgcaccctccccttcacgcgtgcacccagtccaggctccctcaagccccacgggtgccttttagacctgaggaggttgcaaacctgatcccccatacctgccccacccatccgcggacaacccgccctcgcaaactcagacccccacccggaggcttcagattcctcccaggtccagctgccggaaatgcgtgtttgaagggagggtgtgggctcaggggcgaagcacccactggtccccttttttccccccagcagtgagtcgcagccatgttcctggttaactcgttcttgaagggcggcggcggcggcggcgggggaggcgggggcctgggtgggggcctgggaaatgtgcttggaggcctgatcagcggggccgggggcggcggcggcggcggcggcggcggcggcggtggtggaggcggcggtggcggtggaacggccatgcgcatcctaggcggagtcatcagcgccatcaggtaaggcggagactatcagaggggcggggcctgggaatgggaggagcctcagtgaggcgtggtctgggaggggcgtggtctaaaaatagaataggattaacctggaggctaacctgggtacatgaattaggccggggaggcctggtttgagagttctgctgtaagggggtggaccccagtgaggcggatatcagtcattgggggcggtgcttgatatgggagtagtctgattgtgtgggaccaggacaatgtggtcctgaggggactgatgtggagttttggcgggtggggcttatgggtctgggctcagcctgcattggctaacctggagatgaacgttaaaggtgcggagccaatgcgtctgagtgacattttacggaaggggcttgacttatgagtgtggtcagaggttttaggtgggttaatgaggaggtgagcccaggaggaagcaagacctaatggggtagggtaaatggcccagaatgggctgggcttgctgggaactggctggattaatggagaaaaatgccctggtagggatagggcaggttggcttaattagccacggccacttagcagtgatcccttgaaggggcggggaccaatggctggggtaggatgttgggaagacgggcatttaggaagcgggccatggagtagggtcttgggcagatggcacctgaggaggataaggccttgggaagctggggcagagcctctatgaagtgagccctccaaggggcggggtcttttgattctacgtgggattttttaggtttagggtggccaagatgactgaaatctgccactgggtaggtgtgcctggcaggaggggagcctcccaggggaccggtctctgggtttcctcgagggtggggttggcctgaggaagggagaagaggggcacgaccagggcagtgtggattgggacagatgaggacaagaacaaatgaaaggcacagcaaccaagtaaggaagataacggctggggtctggagcgttggggctgatggttctgtagtgctgcccgttggaggccccgcccctggcactaacccctcccccttatctcttcgcagcgaggcggctgcgcagtacaacccggagcccccggtaagccccctctgcaaccagacccccttctcctgccaaggcctcttcgaggtcccatccctgttcctgtagagaagccccaccttcctccccttcttgtgaaattcctctgccagttcctcccatgccgtgtctgcagcttcgccatgggtcttagccatgccccacatacgtgcaccccattcactaccacccctcattcttttcctcatcaagctgcccagcccactctgacttccccacccagggtacctgggtttggggagccgtcctggccgggttcccctccccctgctctgagctctcctccctttgcagcccccacgcacacattactccaacattgaggccaacgagagtgaggaggtccggcagttccggagactctttgcccagctggctggagatgtaagtaacctggggtccctggccccgtcctaaccgttccatcccttcccttgtggctgcccttgcacacacacccttgaccatgacaatcccagtgttcccattctccatgacattctcagacccctttcagtcacccctgacctgcccctaacttccgcccgcaggacatggaggtcagcgccacagaactcatgaacattctcaataaggttgtgacacgacgtaagtgaccggggttaaggaatagggtagattcagaggcagaggggtcagagaggatttgacctctggcctctgactttcaacctgttacccacagaccctgatctgaagactgatggttttggcattgacacatgtcgcagcatggtggccgtgatggatgtatccttgggggcagtgtgggagaggccctgggtggacagagagttttttgagagtatgtttgggaagccaacatgtagctttcatatccacagatgtggaaatgcattcatcagaacacagtcacctgcagacatgtggcggtaaatcataacaatgccagctgtcacagctggcactttaattatataaagtgaccgaaccgtcataaccaccctgttggacaggcacaattattatattccattttacagaagaggaaactgaggctcagtttcctgaaagaagcagtcatttgtctcaagttatagataaaggtcaggcatggtggctcatgcctgtaatcccaacactttgggaggctaaggtgggcagatcacctgaggtcaggagtttgagaccagcctggccaacatggtgaaaccccatctctattaaaaatacaaaaattggccaggcacggtggctcacacctgtaatcccagcactttgggaggccgaggcgggcggatcacgagatcaggagattgagaccatcctggctaacacagtgaaaccctgtctctaccaaaaaaaaaaaaaaaattagccgggcgtagtggcgggcgcctgtagtcccagctattcgggaggctgaagcaggagaatggcgtgaacccgagaggaggagcttgcagtgagccgagatcgcgccactgcactccagcctgggcgacagagccagac[136 bp omitted]cggtgaaaccctgtctctactaaaaatacaaaaaaattagccgggtgcagtggtgagcgcctgtagtcccagctactcgggaggctgaggcaggagaatggcgtgaacctgggaggcggagctttgcagtgagccgagatcgcgccactgcactccagcctaggcgacagagagagactccgtctcaaaaaaaaaaaaaaagaaaaaaaaagaaaaataacaataacaaaaattagctgggcgtggtggtgcacgcctgtagtcccagctactcgggagtcccagctactcaagcaggagaattgcttgaacccgggaggcggaggttgcagtgagcagaggtttcgtcactgcactccagtctgtggactcaggtcttttgggcttgagaacccacgtttataacagccacatgcgcatatacacacacacacacctaagagcacacccacatacgtgaaggtgtatgaggcagtgtgcacagggacacacgtgttatctgtacatgggccagccattagctgatcttggatacatgcatatttttatttatttttgttttaaaaaatattttatagagaaaagctttcactatattgacctggcaagtctcaaactccagaccttaagcaatccttccgccttggcctcccaaagtgttgggattacaagcttgagacactgcgcctggcctcatgcacatttaacacatagggcaaacagacacatacataatatacatgtcatgtaatcacagacatattgcatagagcaaagcaatcccaactctacctcttaaccaggttattgaaccgctctgtgcctcagtttctctctctgtaaaatgggtgagtgataatggtgataccgaatcggaactacatccaaaaggtttagcacagtgtatagcgcatagtatgtggtctgtacacattagctcttaactatgatcttgggtagagttttcagctttgaatgttttcttctctggaaatagtcctggtagaactggtgtcccaaggatttagtgagaaagtgatgttcctgagtggacatcaggtggatcctgagttcaagcgatccacctgccttggcttcccaaagtgctgggattacaggcatgaaccaccatgcctggtcacacacttgtttttcacatatcctaacatttttatgaaattgagttactgtcaagaattttcttttctttctctttttttttttttttttttgagacagagtctcactctgtttcccaggctgaagtgcggtggtgccatcttggctcactgctaactccacctcctaggttcaagcagttctcctccctcagcctcctgaatagctgggattacaggtgtgcgctactacagctggccaatttttgtatttttagtagagacgggatttcatcatgttggccaggctggtctcgaactcctgacctcaagtgaaccgcctgcttcggcctcccaaagtgctggattgcaggcgggagccaccgtgcgtggcctattaagaattttctgaatgagcaattaacaactcttcaggcaaggaatttgtactttagagtagttgaatataattcctcatggttatgtttaaagagaatccctatttagaaatgtaagtgacaatatgtatggataaaatgaaaaataaaaccgcacaccaggtgatatgactaggaccaagcgggagctggagtttcagccctggctgccctgcttgctgtatcaccatcgtgtccacagtgcatgtgatgcatgcatctgggtgtagctgtcactcttcttaacaccctcccaccagagcgacaccacaggcaagctgggctttgaggaattcaagtacttgtggaacaacatcaaaaggtggcaggtgtgtagaaacctctgaaatccctggcacccagacccccaagccatggagacactatgccccacaatgctcacttggacccaatgtctctgtcctcacaggccatatacaaacagttcgacactgaccgatcagggaccatttgcagtagtgaactcccaggtgcctttgaggcagcaggtatggctggcagggacatgctggggctgggagtgggatgggtgagaaaacctctactcagctggtctgggcctgactcctgggcatgggagtgggttgggccatgtggcccccgcacctgaaggactacatccatcttagggttccacctgaatgagcatctctataacatgatcatccgacgctactcagatgaaagtgggaacatggattttgacaacttcatcagctgcttggtcaggctggacgccatgttccgtgagtgacaacccagctgtcttcctgggtggggattcctatgacctctatggaccaaggtctcctctaagcctgactttgaggtgggcgatgctaggggcacagtggtgattgaatcagttccagtttctgccctcatggagctcacagtctggtggaggagacacaagtccccagacagtgacagttcagactggtgatggctgggagaggggaagctcagggcagagtgatgggttgtgatgggggcagcacaggccgagggtctagggctctggtgaggggaagagtgagcagagcgtgctcagattgtgcttggggaagcctagagggcaaatccaatccaggaggaacctgatgcagcccaaggggtcagggagggctcactggagagggaacattgagacctgaggggatgaggagagaacttagtgagaaggtagggaatactgttgcaggctgagggaacagcctgtgcaaaggcctagaagggaaagaagatggggcttctgatgctttttgttagatttctttctttctatttttttgagacagagtctgctgctcttgttgcccaggctggagtgcagtggcatgatcatggctgactgcagcctcaactcctaggctccagcagtcctcctgcctcagcttaccgaatacctgggagtacaggcacacaccgccatgcctggctaatttttaaaattttttgtagagacagggtcttgctatgttgcccaggctggtcttgaactcctgggctccagcaatcctcctacctcagcctcccaaagctttggtgttacaggcatgagccattgcatgtggccttctgagtgttagtgtactgaatgctgaagacatggctgggaagtggggattactgtccttattttgtgaaggaggaacttaggattcaaggaggcaaattttcatgctcatagtcacccagctaggaagttgtaaagccagaatttgaacttggatctatctgagatctgagctaagtaagagaaggtaggagcagtgagcatgattaggtcatgcaggattgtgggtgccaagtttgggggtgctcaaactctaccagagacattggggagccatggcaggttctaggcagaggga[138 bp omitted]cagtgaaaccccatctctactaaaaatacaaaaaattagccaggtgtggtggcgggcgcctgtagtcccagctacttgggaggctgaggcgggagaatggcatgaacccaggaggcggagcttgcagtgagctgagatctgccactgcactccagcctgggtgacagatcgagactccgtcttaaaaaaaaaaaatcccttggcctccaggccgggtgcagtggcttatgcctgtaatcccagcactctgggaggctgaggtgggcgtaaaacctgaggtcaggagttcaagaccagcctggccaacatggcgaaaccccgcatctactaacgatacaaaagttagccaggcgtgggggcgtgtctgtagtcccagctactcaggaggtttagggagggagaattgcttgaacccaggaagcggaggttgcagtgagcagaggtcatgccattgcactccagcctccaacctgggtgacaagagcgagattccatctcaaaaaaaaaaaaagaaaaaaagatcccttggcctccagagagcccacaatgcatgaaaagtaacagaggaaaagaagcaggtatgtgagatagcagggaggtgaagggagtggacagacaaggttgatgccacaagtcacataagaggggccaggaaatagccactggatctaccagcaagaaggctgatagtcgggaggatcatttgagtccaggagtttgagaccagcctgggcaatgtagtaggactccatctctacaaaaaaaaaaaaatatatgtatatagacatagccgggcatggtggcacatgcctgtggtctcagttgctcgggaggctgaggtaggagaatcacttgagcccgggagggtgaggctgcagtgagctatgatcttgccactggactccagcctgggccacagagacaccgtctaaaaaaaaaaaaaaaagggctgggcatggtggctcactcctgtaatcccagcactttgggaggccgaggtgggcggatcacctgatgtcaggagtttgagaccagcctggccaacatagtgaaaccccgtctctactaaaaatacaaaaaaattagccaggcgtggtggtgcacgcctgtagtcccagctactcaggaggctgaggcaggagaatcacttgaacctgggaggcaaaggttgcagtgagccaagatcgtgccactgcactccagcctgggcaacagagtgggactctgtctcaaaaaaaaaaagaaagaaaggcagccagggtgtgcaggacgctgtgggtatggacacctgagggtggtggtaactgagcggagatagtgtagtcatcatgtctagattccctgtgggtggggaacatggagtcaagtttcagggcaggcgtggggacctacctgtaagactctaggggcaggaagtagagtgtgcagagcctccctctagtagcctgttaggcttagaactggagaggatggagcatagatgtcagtaggaggctggggctgggcagaggtgatatcagtacacagaggccattattgaggagggtaacagattggattccaatcctgatttcttcactttcttgctatgtgacctggggcatggcccctcccttcctgcctcatttctttttttcctgtttttaatttttagtttttttaaaaagcagagatgaggtctctgttgcccaggttggtctcgaactcctgggcggctcaagtgatcctcccatcttggccttccaaagtgttgggattataggtgtgagccaccacgcccagcctgtgcctcattttaaaatgacacttatctcacagagttggattaaatcagccaatacctggaaagcactttaccccatgcttggcacacagtaaatactcagtgaagtgccagctgctatgattgtcatcccatgtatttgtgtaatgttattatgccaaaaaccagtctccttccttccctgccgccaaacctctgcatctcctcctccaggtgccttcaaatctcttgacaaagatggcactggacaaatccaggtgaacatccaggaggtaaggacccccatattggggtatgggtgcctgggaggaccccacccctcagcccttcataccagctctgagctgcagtccccttcctcctattttgccagccgtccctgggtgagggcaaaggggctggtgctcttggggttccctgtcctcactctccaccctcctctccccagtggctgcagctgactatgtattcctgaactggagccccagacccgccccctcactgccttgctataggagtcacctggagcctcggtctctcccagggccgatcctgtctgcagtcacatctttgtggggcctgctgacccacaagcttttgttctctcagtacttgttacccagcttctcaacatccagggcccaatttgccctgcctggagttccccctggctctaggacactctaacaagctctgtccacgggtctccccattcccaccaggccctgcacacacccactccgtaacctctcccctgtacctgtgccaagcctagcacttgtgatgcctccatgccccgagggccctctctcagttctgggaggatgactccagtccctgcacgccctggcacacccttcacggttgctacccaggcggccaagctccagaccgtgccagacccaggtgccccagtgcctttgtctatattctgctcccagcctgccaggcccaggaggaaataaacatgccccagttgctgatctctatgggatctgcctcctgatctgacccgagagaggaggggtggctcgggctctgggtcctggggagcaggggaggtagtagattcgtccccagggctggatccgtggatttcctcgtctttttctcgtcggcattttttgtctcatcctgagctgtggaggctgagacaggacccagaagccccagtgatctctgcttctgcttccagagtctgggctggagggaggtctcaatgccactcctggccctgtcccccaaggccatgtttgcccctcttgcagcttctccatccacacttggcctctgcctctgttgtgtcatggaccatgctcagtgtcttccttcccacttgaggacaccaccccacgtccccgggtcccgagggggagcctatgggtgctgtttggggtactcagcagagggctgagaggtagcaacatcctaggagtatccctggtccagcatgaggcaccgagggctgggggcagtgggcagtccacagggcagagatccctggctggtgggaggatgggcttggtggggaggggtggacacaaacacagacacacacagaggccagcgtttattgacacttgttcaagtctctcaggccccccaggcttcttggtcttaattcctggggaaggaggcccagccaagggagtacaagctgtagacagtgcctagaaaggggaagcgttggagacagaatgagacctaatcccctccctggacatcccaggcttttaaggccttcaggctccctggttcccagcctggaccccagctctagttcggactccagctcccttcccagattggactcctattgtaaagccccctggctttgatctagaccgggctgggagctttctccccgactcctccctgggcctcagccccaccactaacccagcccccgtcctgggacaagagcccaaaccctagttactcccctccctgcaggcctgactccagctcagtactcgacccccttcctaaacgccaacccccaacccagatcctggtcagtcctgcccagaaaccagccacctcttactctgggtccagccccgcctcccccgcagcccagacgggccctgcgctcaccgcccagacacagcgtcattgtcactcggtacaggatgttgtcaacgatgccgcccttcaggtacaacgggatgtcattgtcctcctggatgtgggggtgtctgatgagaaaggggtgctggctgctccttagagcgcgccccgcctgccccggctcggcgcgctcccggctggcgcgtcggatccccaccccccccgaccccccacctggaagagcttctgtttctcgcgcactcggttctgaaagcggttccgggcggtggagctgaaggagcggatcagcgcctgggacacctgcggggtgggaggtgggcgggtattggaggcacctggaggggtgtcctgaagtgggaccccgctctctgaggcctggacgtggggacagccccatccctagcgagcgtcccaaaggcgaggagggtaatagcttggattctgttacccgcgaactgccagctgggttgggaggggactcgccctggagtctggcctgggggtgaccgggctgcctagagggtcctggaagggagaggacccagaaggactttgttctggggggcctaagtcctgagatttttgttgggggagggtttcctggattaaagggaggaaaccaggtcccgggaacgtggggaccggaatggaggtccccgggagcgtccaggctgcctgagaaggcccgggtgaggccagtgttaagggttcccgagatgtcaagttcaaacccggggctttgggccggggtgggggtccccagttgtctccgaagagtggattgtgggggaagggacccaggctgtttagcggggagtcccaggccctgaaggtggctcacgttccaaggccctagatgcgggggcacttggagagtcgcgtattagggcggggttttctgggtggggggctccggcccagcccatgggggcctcacccgaagggcctgcattctgccttgtcctcttccgccggagtcacctcccttctccgcccaaggacacgcgtagtcctcctctgtccaggaaccccaggccccacccgctgcgcgcagcgtgacagctggggacgcggcggggctggggctggggctggggctgggttgcggggagtcctgctcctcggattcgtccaccacggaggaggcggtccagacccgcaccctgggccgcagcgcgcatccgtttcggtctcggaatttcgcttggtcccaccggagcccaaagcggtaccagggaatacatttttgcagatttttggagatttccgccgggggcaagtgcaactcctccccggatctctccctgcccgctggtatgtgagagtgaggaaacgcataaggccgtgttccaactccctgttctgtctacacagccagagattgcacctccgagcctgtttccgtatctgtaacgtgagggctaaggcaggatctttctcagagatttgttgagacattaaatgaccttgtttttaggaaacacaagctaaagtctttgggagtaaaacggtattttatgttaccctaagaaacacatcatatctatttatagctctctaattctggcagtcaacggggtgcagcacagttgtcctaatggttttagcaaccaggaaagatcctggcctagtctacaaggttttctttttcttttcttttttttcttttttttttagacagggttttgctctgttgcacaggctggagtgcagtggtgcggtcatagctcactgcagcctcgacctcctgggttcagcgatcctcctgcctcagcctcctgagtggctgggactacaggcgcccaccaccatgctcgaactaattttcgtattttttgtagaggctgggtttcaccatgttgcccaggctggtgtcgaactcctgagctcaagaaatttgccggcctcatcgtgagccacgcacccagccagcagacaatgtttgtttgtttgtttttgaggcagtgtcttgctatgttgcccagggtggtctccaactcctccaagtaatgttcctacctctatcacccaaagtgctagaattagaggcatgagccactatacccagcttgtaaaaggttttaacaatctcttttatttatttatttaatttatatttttagacagagtcttgctctgttgtacacgttggagtgcagtggtgtgatctcggctcactgaaaccttctgcctcctgggtttaggcaattcttgtacctcagcctcctgagcagctgggattacaggcacccgccaccacacccagctcatttttgtattttttagtagagatggggttacaccatgttggccaggctggtctcaagctcccaacctcaggtgatccgcccactttggccttccaaagtgctggaattacaggcctgagccaccgcttccagccacggtctcttttaaagagggcttttatgattattaaattcccctaacactttcaaactatgcttgtaaatttaatgttaggtttttccatttaagagccacaagtagggctgggcgtggtggctcacacctgtaatcccggcactttgggaggccaaggcaggtggatcacttgaggctgggagtttgagaccagcctggtcaacatgacaaaaccctgtctctactaaaaatactaaaattaaccaggtgtggtcatgggcgcctacaatcccagctgcttgtgaggctgaggcacaaaaatcgtttgaacccaagaggcacggaggctgcagtgagccaagattgcaccactgcactccagcttgggtgacagaacgagattctgtctcagaaaaaaaaaaaaaaaaaagctgacttaccagataaacagatgactctttcttcaattcttaaataacttttatgaataaaaaattcataaactgtacataaacagatttcaagtaagtcttagtcaccagctgaattccacattttacaatggaattacaagattgacctgttatttgaataggccagtttaccttaaatattacaaattcttaaaataccaagtattcacagattctctaacacaaagttaataccatgggggccaggcactgtggctcacgccagtaattccaacactttgggaggccgaggtgggtggatcacctgggtcaggagttcgagaccagcctggccagcatggtgaaaccccgtctctactaaaaatacaaaaattagccaggcgtggtggtgggtgcctgtaatcccagatactccggaggctgaggcaggagaatcacttgaacctgggaggcggaggttgcactgagcagagattacgccattacactccagcccgggcaagagagcgagactccatctcaaaacaaaacaaaacaaacaagttaatactatggttttgactgtcttaattttcttttttcttttttgagacggagtcttgctcagtcacccaggctggagtgcagtggcgccatctcggctcactgcaagctccgcctcccaggttcacgccattctcctgcctcaggctccccagtagctgggactacaggcgcccgccaccacgtccagctaagttttttttttgtatttttagtagagacagggtttcaccg[137 bp omitted]caggctggagtgcaatggcgcaatctctgctcactgcagtctccgcctcccgggttcaagtgattcccctgcctcagcctcccaagtagctgggactaggtgcacgacaccacgcctggctaattttttgtattttagtagagacgaggtttcaccatg[131 bp omitted]atgcgcgtccgtgtgaagagaccaccaaacaggctttgtgtgagcaacatggctgtttatttcacctgggtgcaggcgggctgagtcagaaaagagagtcagcgaagggagatagggatggggccattttataggatttgggaaggtaatggaaaattactgtcaaagggggttgtgctctggtgggcaggggcgaaggggtcacaaagtgctcagtgggggagcttctgagccaggagaaggaaattcacagggttaatcactcagttaaggtggggcaggaacaaatcacaatggtggaatgtcatcagttaatgcggggcagggccttttcacttttgtgattcttcagttacttcaggccatctgggtgtatacgtgcaagtcacaggagatgcgatggcttggcttgggctcagaggcctgacattcctgccttatgttaataagaaaaataaaatagtgtcgaagtgttggggtggcgaaaatttttggggggtggtatgaagagagaatgggcgatgtttctcagggctgcttcaagcgggattaggggcggcgtgggaacctagagtgggagagattaagctgaagggagatcttgtggaaaggggtgatattgtggggatgttagaagaaacatttgtcgtatagaatgattggtgatcgcctggatacggttttgtatgaattgaaaaactaaatggaataagaaaaggagcaaaacaggtataaaaggactaagaattgggaggacctaggacatctgattagagagtgcctaaggagattcagcatagtcctgccagcaaagattatttatttacttcaagagttaagagtggcagtttggggatagcatgaggagatatcagctgtgatggcttggagaaactgtgtaaactggcagtgtaaacaagagcagggcatgtatgagtagttgagaacggtgaataggagtatgactagacagaagatagtagggatgacaagttattcgggggcacagtctaagttggtctggtgtctggaatgagactggggcctaataaaaaggagcgtctatacaggagcttaaatgggctgtagcttgtagcattctgaggacaggtctgacttctgagaagggaaagtggtaaaagtattgtccagtcctttttaagttggtggctgagcttggtgaggtgtgtttttaatagaccattagtctgtcactgaatactaagagctggaaaaaatgcttggctgatttgactaataaaggctagtctgttaccagactgtatagaggtgggaaggctaaactgaggaattatgtctgacagaagggaagaaatgactgtggtggccttctcagaccctgtaggaaaggcctctccctatctagtgaaagtgtctacttagactaagaggtattttagtttttgtgactcggggcatgttgagtaaagctaatttgccagtcctgggctggggcaaatgctcaagcttgatgtgtagggaagggagggggcctgaataatccttgaggagtagtagaataacagatggaacactgagaagttatttccttgaggatagatttctacaatggaaaggaaatgaaaggttctaagaggcgggctagtggcttgtactatagcatagcctgcctttgctggtgtgtggcgattaggcctggtggaactgccatcaataaatcaagcgtgatcagggtgaggaacagggaagaaggaaatgtggggaaatgggatgaacatcaggtggatcacagagatgcagtcatgggggtcaggtgtggtatccggaataatgtgggaggctggattgaagtccgggccaggaacaatggtaattgtgggacttaacaaaaagtgagaacagctgaaggagtcagggagcagaaagtatatgcgtcaggtgtgaggaagaaaatagattttggaagttatgagaaatgtagagagtgagttgagcatagtttgtgattttgagggcctctaatagtattaaagcagtggcagccgctacacgcagacatgagggctaggctaaaacagtaaggtcaagttgtttgcacagaaaggctacagggtgcggtcctggctcttgtgtaagaattctgaccgcactaaccatgcctaggaagggaaggagttgttgttttgtaagggatcgaggtttgggagattaatcggacacgaacagcagggagagcacatgtgtttttacgagaattatgccgagataggtaacagatgaggatgaaatttgggcttgactgaagtaatggggtctgtctgtgaagccttgcggcagtacagcccaggtaatttgctgagcctgatgggtgtcagggtcagtccaagtgaaagggaagagaggctgggaagatgggtgcaaaggaataggaaagaaagcatgtttgagatccagaacagaataatggattgtggagggaggtattgaggataggagagtatatgggtttggcaccatggggtggataggcaaaacaatttggttaataaggcatagatcctgaactaacctgtaaggcttttccagtttttggacaggtaaaatgggggaattgtaaggagagtttataggctttaaaaggccatgctgtagcaggcgagtgataacaggctttaatcctttcaaagcatgctgtgggatgggatgttggcactgagccgggtaagggtgattagcttttaatgagatggtaaggggtgcatgatcggtcaccaaggagggagtagaggtatcttatacttgtgggttaaggtggggggatacaagaggaggatgcaaaggaggctttggattgggaagaagggcggcaatgagatgcagctgtagtccaggaatagtcagggaagcagataatttggttaaaatatctcggcctaataagggaactgggcaggtggggataactaaaaatgagtgcataaaagagtattgtctaagttggcaccagagttggggagttttaagaggtttagaagcctggctgtcaatacctacaacagttatggaggcaaaggaaacaggcccttgaaaagaaggtaatgtggagtgggtagcctccgtattgattgagaaggggacggacttaccctccactgtgagagttacctaaagctcggcatctgtgatggtctacggggcttccgaggcaatcgggcagcgtcagtcttcagccgctaagccaagaaggagtcagtcagagagccttgggcaagagttccaggggctctgggagtggctgccaggtgagttgaacagtccgatttccagtggggtcctgcacagatgggacacggcttaggaggaatcctggactgcaggcattccttggcctggtggtcagatttctggcacttgtagcaagctcctgggggaggaggttctggaggaacgcctggccgctgcggttcaggcgtttggaagttcttgtgtgctggagatgtggctggggtttgtctcacagtggaggcaaggaattgcaacttttttttattattgtacaccttaattaagtcctgttttggggtttgagggccagattccaatttttggagttttatttaatgtcgggagcagattggataataaaatgtatattgagaataagatggccttttgaccttttagggtctagggctgtaaagcatctcagggttgctgccgaacaagccatgaactgggctgtgtttttatatttgatgaaaaagagcctaaacgcttctgatttgggataaagaaaaagcattaaccttgactatgcctttggctccagccacctttttaagagtaaattgctgggcaggtgggggagggctagtcacagaacgaaactgtaagctggaccaggtgtgaggaggggaggtgataaaaggattatagggtggaggagcggaggctgaggaagaattgggacctagctcggcccggcgaggaggggagaggtcagatgggtctgtagaaaaggaagattagaaagactcagcaatgcttggggttgggagtgaggggacaggtgggagggaaagaaggaagatttgggacgagttgcactgggcacagagactaggaaaggactgatgtgtaaaagaatgcctggacatcaggcacctcagaccatttgcccattttacgactagaattatttagatcttgtaggatggaaacattgaaagtgccgttttccagctatttggaactactgtggagtttgtattggggtcaagcggcattgcagaagaaaataagacgcttagattttaggtcaggtgagagttgaagaggtttataagttcttaagaatacaggctaagggagaaggaggaggaatggagggtggaaacttgcccatagtgaaggaggcaagcccagagaaaagagtagagacacggagaaggggcgggggtttcttgcccttcagaaaagcagagaaagggttggggcatggaaataagggattgggggttcttgccccctagaaaagtgggacttaccactaacggtgaagaaggggttgaggggttcttgctcctgccccagaagagcagagaaggggtagagacacggagagaaggggttggggtacttgcccctccccgagaaaagcgggacttgccactaagggtgaaggaccaaggcaggtgtccctgcgtggtttgacacctttgaaacgtgggggaataatcagagaggtggccctgcaatgattaaacaccaagggaaggctgccttcccagtccgtgaccggcgccggagttttgggtccacggataaaacgtgtctcctttgtctctaccagaaaatgaaaggaattgaaattaagagaatggagagattgaagtgtggcgccaagattgaaaggagaaagaggttgagggatagggaggttggagaagagagtaaaaagaggccgcttaccggatttgaaattggtgagatgtttcttgggctggtcagtctgaggacctgaggtcataggtggatctttctcacggagcaaagagcaggaggacgggggattgatctcccaagggaggtcccccgatcagagtcacggcaccaaatttcatgcgccacatttcatgcgcgtccatgtgaagagaccaccaaacaggctttgtgtgagcaacatggctgtttatttcacctgggtgcaggcgggctgagtcggaaaagagagtcagcgaagggagataggggtggggccgttttataggatttgggaaggtaatggaaaattacagtcaaagggggttctctggtgggcaggggcagggggtcacaaagtgctcagtgggggagcttctgagccaggagaaggaaattcacagggttaatcactcagttaaggtggggcaggaacaaatcacaatggtggaatgtcatcagttaatgcggggcagggccttttcacttcttttgtgattcgtcagttacttcaggccgtctgggcatatacgagcaagtcacaggggttgcgatggcttggcttgggctcagaggcctgacagtttatttttgcctcttggttcagcgacacaaggacctcaaaatgttcaggtggaagtcttatctcccagttgttggatccattgttgtgtgcccagtggaagcattcctctccatgaggaccaaaatctctaaactagcagagctcaaagctgttgaggagagaagcaattattcaagttactgtgtgtaacagagagaggaaccatttctactcactttccccctgactcccagtcccataaattctcactatggggaaacatggtagagtggtctctcattcaaagcacaggccatgtcctgtaagacaatcccattttttcagggtattgtttcccagttggtactttaatggagtcattgctgactcattctacctttcagttaggccagttgcttctgggtgatggggaagatagtaagattctataagattccatgggcaggagcccattgctgcacttccttcgctttcaaatgaaattttttttttttttttttttagagataaagtacttggtctgtcactcaggctggggtgcagtggcaccatcatagctcactgaagccttgatctcctgggccaaagtgatcctcttacctcagcttcttaagcaactggaactacaggtgggtcccagtatgcttggctaatttttttggtgttcttagtagagacagggtctcac[143 bp omitted]catgatggtgggtgagcatgctttgagtctgcagatggtagtgacagcaaacgcattaaaggcagggaagcacgttcgtgtctgggatatctgtctattccagtgaggacaaatctttgccctcttcatgacggaagaggtccaaggtaatcaacttgccaccgggtagcaggctgatccccagggaatggtgccatattggggctcagtgttggtctctgctattggcagattaggcgctcagcagtaacagtagccaggtcagccatggcaaggggaagctgacgttgctgaacccatgcatagcctccatctctgccaccatggccacttttttcatggacccattgagcaagcattagggtggctgggaaaagagcctgactctcatgc[141 bp omitted]aacacggtgaaaccctgtctctattaaaaatacaaaaaattagccgggcgtggtggtgggcgcctgtagtcccagctactcgggaggctgaggcaggagaatggcgtgaacccaggaggcagagcttgcagtgagccgagattgcgccactgcactccatccggcctgggtgacagagcaagactccgtcttaaaaaaaaaaaaaaaaaaaaaaaagaatttttcggctgggcatggtggctcacacctgtaatcccagcactttgggaggccgaggcaggtagatcatgaggtcaggagatggagactatcctggctaacacagtgaaaccccacctctactgaaaatacaaaaaattagctgggcgtggtggcgggcgcctgtagtcccacctactcaggaggctgaggcaggagaatggcgtgaaccctgggaggtggagcttgcagtgagccgagatggcgccactgcactccagcctgggcaacagagctagactccttctcaaa[131 bp omitted]gaaaccccgtctctactaaaaatacaaaaatttagccgggcatagtggcgggtgcctgtagtcccagctactcgggaggctgaggcaggagaatggcgtgaacccgggaggcggagcttgcagtgagccgagattgcaccactgcactccagcctgggtgacagagccagactctgtctcaaaaaaaaaaaaaaaaaaaaaaaaaaagaaaaatctgtggctgggtgcagtggctcacacctataatcccagcactttgggaggctgaggcaggtggattgcctgaagtcaggagttcaagaccagcctggccaacatggtgaaaccccgtctctactaaaaatacaaaaattagtcgggtgtggtggcgggtgcctgtaatcccagctacttgggaggttgaggcgggagaatcacttcaacccgggaggcagaggttgcagtgagccgagatcgtgccattgtactccaacctgggaaacagagcgagattccatctcaaaaaaaaaaaaaaaaaaaggaattttcacttcagtggctgcccttgggtgggcactcctatgggacacaaatatcttcacagtctgtgcagagactgagaggcccatccatatgcctctccaagcttccttgtcattaatctttcaatcttcttccttccacgtacttgaccatccacccaaaccattagcaactgcccataaattagtatagatctatacttctggccacttctccctccaggcatactggacaactaaatgtgcagcatgaaattctcttttttctttttgaaacagagtctcgctctgtcgcttaggcaggttgcggtggcacaatctcagctcgctgcaacctccacctcccaggttgaagcaattctcccgcctcagcctccgcagtagctgggactacaggtgtgtaccaccacacccgacctacatgaagttctgaccactgccctgtaggttcatccctaagggaggttgtaatgctgccattgtccactttcgagcggtaccagcatgatgtacagactagctgtaagccaggctcaagtttataattattttttttgaaacggagtctcgctttgttgccaggctggagtgcagtggtgcgatctcagctcactgcaccctccaccttctgggttcaagagattctcctgcctcagcctcccgagtagctggtactataggtgcctgccaccatgcccagctaatttttgtatttttagtagagacggggtttcaccatgttggccaggatggtctcaaactcctgacctcgtgatccacctgcctcagcctcccaaagtgttgagattacaggcgtgagccaccacgcccagccaagtttcttcctcatttcactgggcataaggaacatgccagaggaaaagtttggcttgaagtctaggaaccaatgcaacagaggttagtgttgaaggactctgaccttgttaatggtaaagcagcttcaaaagccggcacggtggctcaacgcctgtaatcccagcactttgggaggccgagatgggcagatcacgaggtcaggaaatcgagcccatcctggctaacacggtgaaaccccgtctctactaaaaatacaaaaaattagccgggcgtggtggtgggcacctgtagtcccagctactcgggaggctgaggcaggagaatggtgtgaacccgggaggcgcagcttgcagtgagccgagatcgcgccactgcactccagcctaggggacagagtgagactccgactcaaaaaaaaaaaaatttttggctgggtgtggtggctcactcctgtaatcccagcactttgggaggctgaggcgggcagatcacctgaggtcagcagttcaagaccagcctgaccaacatggtgaaaccccgtctctactaaaaataaaaaattagctgggtgtggtggcgcatgcctgtagtcccagctacttgggaagctgaggcaggagaatctcttgaaaccgggaagcggaggttgcagtgagctgatatcacaccactgcactccagcctgggaggttgcagtgagctgagatcgtgcccctgcactccagcctgggcgacagagtgagacttcgtctcaaaaaaaaaaattttaaaaaagagcagcttctactgcagcctcctcttaccctattgccttctcttgctctggtctccactcaaagcatgcagccttctgggtgattttgcagatgggtcaaaacagcatactcaatgttgcctcccaaataaaaaaacctaccgaccattgtacttctttctttgtggtaggtactgcaacttg[136 bp omitted]atggagaaaccccagtctctactaaaaatacaaaattagcaaggcgtggtggcgcatgcctggaatcccagctactcagccggctgaggcaggagaatcgcttgaacctgggaggtggaggttgcggtgagccgagatggtgccattgcattccagcctgggcaacaagagtgaaattccgtctcaaaaaaaaaagaagaagaaaagaaaaaatatctttctttcttgctgggtgtggtggctcatgcccgaaatcccagcactttgggatgcccaggcaggcggattgcctgagctcaggagttcgagaccagcctgggcaacaaagtgaaaccccttctctactaaaatacaaaaaattagctgggtgtgctgctgtgcgcctgtagtcccagctacttgggaggctgaggcagaattgcttgaaccccagagatggaggttgcagtaagccgagatcatgccactgcactctagcctgggtgacagagcgacactccatctccaaaaaaaaaaaaaaaaaaaaagtagaaaagatatctttatttccctccctccctcctttccctctttccttcctttttgagacagggtctcactttgtcacccagactgaagcgcagtgataaaatcacagctcagcagcttcaacatcctgggctcaagtgatcctccaatctcaacctcctgaatagctgggacaacagttgtggaccaccatgcccggctaattttatagagatgaggtcctactctattgtccaggctggtctctaactcctgggctcaaacaatcctcccgcctgagcctctgaagggctgagattataggcatgagccactgtgcctggcctgaagataattttagatccttatcagactggagatggtaccagaggaatctacattaacgagttttcttttttttttgttgagacagagtctcactccgttgcccaggctggagtgcagtggtgtaatctcggctcactgcaaccttcgcctcccgggttcaagcgattctcctccttcagcctcgtgagtagctgggattacaggcgccaccaccgtgctcagctttttttgttttgctttgttttttttgtatttttagtagggacgggtttcaccatg[134 bp omitted]ggcttctcacaagttactaccccttttcctttgttctataatttctctaaaaattttatgctttttgttgaagacgctgtataagctggaattcgaagccacctctttgagaactactcattccctgggtgtctcccatgtgtataagaaatatacatgttaataagcttctgtttgtttttctcttattatcttttgttacaggggtacattccaactaggaacttatgaggattaaagaaaaaatatttttcaggccaggcaccatggctcatgcctgtaatcccagcactttgggaggccgaggcaggtggattacctggggtcaggagttcaagaccagcctggataacatggcgaaatcccgtctctactaaaaatacaaaaattagctgggtgtggtggcatacacctgtagtcccactacttgggaggctgaggcaggagaatcacttgaacccaggagacggaggttgcagtgagccgagatcgcgccacttcactccagcctgggcaacagagtgagactctatctcaaaaaaaaaaaaaaaaaaaaagccaggcatggtggcttacacctgtaatcccagcactttgggaggccgaggcgggcatattacaagctcaggatttcgagacccgcctagccagcatggtgaaaccccatctctactaaaactacaaaaaattagatgggcatggtggcacgcgcctgtaatctgagctactcgggagactgaggcaggagacttgcttgaacccgggaggcagaggttgcagtgagccgagattgtgccactgtactccagcctgggcgacagagtgagactctgtctcaaaaatatatatatttttcttcccctgtaaccccccaaaacttcactgaggtgggagggggtcgctgaattttgatggtgactttctccaattttctcattcgtacataccttactaaagcatttaaagtacttgctatttgttgctcgtcaggaccaatcagcataatgtcattcttgtagcagaccgatgtgatggcttgtgaaatgtcaaaatgatcaagatttagtggacaatattggggcaaagagcaggagaactgctgtagcctggaaataccactctcaaggtatactgttgggtctgccaattaaaagcaaactgcttctggtggtccttgaaaattgatatggagaaaaaggcattaggcaggttaatagctgcataccaataccagattctgttgatttgttccagcaagcatattacatctggtacagcagctacaattagaataactatctgattatgtttacaatagcccacagtcattcctcaagttattcttttttgacacgcttatttatttatttattcattttttcaagacacggtcttgccctgccgtccaggctggagtgcagtggtgcaatcttggctcactgcaacctccacctcctgggttcaaatgacccttccacctcagcctcccgagtagctgggatcacaggcatgggccaccacacctggctaacttttgtatttttaaagagatgggatttcgccatgttgcccaggctgatctcgaactcttgagctaaagtgatctgcctacctcagcctcccaaagtgctgggattacaggagagagccaccttgcctggccgtgatgcttattattttaaaccactgttttgggtggcggtgtttttgagacagagtttcgctcttgttgcccaggctggagcgcagtggtgcgatctcagctcactgcaacatccacctcctggattcaagtgattctcctgcctcaggcctctccagtagctgggattacaggtgcctgccaccacgcccggctaattttttgtatttctaatagagacagggtttcctcatgttggccagattggtctcgaactccagacctcgggtgatccacctgcctcggcctcccacagtgcggggattacaggcgtgagccaccgtgccaggcctgtttttgtttgttttttgaaacagtttcattctgtctcccaggcttgagtgcagtggtgcggtcttggctcactgcaacctccacctcccaggttcaagcaattctcctgcctcagcctcccgagcagctgggattacaggcatgtgccaccatgcccagctaatttttgtatttttaatagagatggggtttcactatgttggccatgctagtctcaaattcctggcctccagtgatccaccggccttggcctcccaaagtgctgggaattacaggggtgaggcaccgcacctggccttgggtgttttttaatataacaaaagctaattgacatagggacatgcatttctgcttcaccaaagtccccaccaacccctattgtcttccatctatttcacttactcctatttctggcatggtccttgtaggcatttgagtttgccactcatggatagggcctggcatggcaaactgcctggaccttccgcactgctccctaccatcaccctccaatcccagttcctgggagggaatcccgggtctcattccacccatttctcctccccagcaccttccccagttcctgcccaccatcatcttctcgcttctggctcactgcacccatctcttctctgttctccgtgtatacagctgtaatcattatctagttaattgctccgactctgagagagtaataaaatttctcttatctcaacacaaagtctttggttacagcctggacaagtttcctggattaagctccaaggtgccaggaagtctggaacaatatctccatatcaaaaacaatgaagcagctggcacaggggctcacgcctgtaatcccagcctgggcgacagagcgagtccttgtctctaaacaaaacaaaacaaaaactgctgctgccatagcacaggtctcatttaggaatggttttgtcaacttgcgggacaaatgagctcaaactcagtataaatggccagctgggggatgccatctctgctgctctgtatcggtttacatgaggacttagctgctagaa[134 bp omitted]caacatggtgaaatctcgtctctactaaaaatacaaaaatattagccgggcatggtggcgggtgcctataaccctagctactcaggaggctgaggcaggagaattgcttgaacctgggaggtggtggttgcagtgaggtgagatcgagccactgcactccagcctgggcaagactccgtctcaaaataaataaataaataaataaataaaaacagaatttacataccaacggatctcaatataggggtcttatttggatcttgatataaacaaatattttaaaatttatgacttttttttttttttttttttttagacaaggtctcactccagcctgggtgaggtgacagagtgaaactatgtctcaaaaaaaaaaaaaaaaaagagtccttatatcttagaaacacataaacacatactcattttttttttttggtggcatggtgtgatgtatagtgtattagctatctattgctaagtaacaaattttacccccaaatgtagcagttcagttgactttctcttgagagggagtctcattctgtcgcccaggctggagtgcagtggcacgatcttggctcactgcaacctccgcctcccggattcaagcgattctcctgcttcagactcccgactagctgggattacaggcgcccgccaccacgccctgctaatttttgtatttttagtagagatgggatttcgccatgttggccaggctggtctcgaactcctaaattcaggtgatccgccagcctcaccttctcaaagtgctgtgattacaggcatgagccacggtgcccggccacgcagttcagaacaatacttatttattatctcagtttctgcgagtgtagaatgtgtggatggttcagccctgccacaatcacacagcgggtgggaagaccacaggagttgcgggttgtaggtgggaaggggacctgccctcgggcggactttggtgccgctctgctgccatcttgtggcgggcacagaaacaactgccctttccacctggtccttcccatactctaaccattcttggtattttagaacttgctattcaaaatttttagtttttattctcccagttgctgaacagatgataaagtcacatggtttaaaattcatgaggataaacagggtcttcctctccctggggactctaggtttctttccaggggaactattctatgttatttctttttttcttttctttttttctttttctttttcttttttgagatggagtctcgctctgttgcccaggctggagtgcagtggtgcgaactcggctcactgcaacctccgcctcctgggttgaagcgattcttctgcctcagcctcctgagcagctgggattacaggcgtgcaccaccacacccggctttttttttttttttttttttgtatttttagtagagaaggaagttttaccatgttagtcaggctggtctcaaactcctgaccgcaggttatccgcccgcctcggccttccaaagtgctgggattacaggcatgagccaccgcgcccagccacttacttgtttcttgtgtatctttctgggaaaagttcatgtatatacaaaagcaaacaacacacacatacacgaccaacaacaacaagagcaccccccaaaacatgcccagcctttcccagtaataaaaggataatttgttcctggccaggtgtggtggctcacacctgaaatcccaacattttgggaggctgagacaagaggaccactgaagcccaggaattggagaccagcctaggaaacacagtgagatcccttctcaacaaaaataaaaataaaaaaattagctgggcgtggtggcccatgcctgtggtcccagctactgggaaaggctgaggtgagggaatcacttgggcctgagaggcagaggttgcagtgagccaggattgcaccactgcactccaccctgggtgacagaatgtgaccctgtctcaaaaataaaaaataaggccgggtgcggtggctcacgcctgtactcccagcactttgggaggccgaggcaggcggatcacgaggtcaagagatcgagaccatcctggctaatgcggtgaaaccctgtctctactaaaaatacaaaaaattagccaggcatggtggcgggtgcctgtagtcccagctacttggggggctgaggcaggagaatggcgtgaacccgggaggcggagcttgcagtgagccgagattgcgccactgcacttgggcctgggtgaaagagccagactccatctcaaaataaataaataaataataaaaaataaaaaaaggttagttattatgatcctgccagcatctcagctacatgaatgcgtggagtttttcagtattgttccctgctgatctccagtgtctggaacagtgcctgacacacagtaggtgctcaggaaatatatttcagttcgtaatgatgggaaatgtcaaacacacaaaaacacagcaagtagaataatgaaccccctgtacctatcaccgagcctcagcaaacttgcctcatctataccccacccaccttttcccctcaatggatttttaaatcaaagccaaggcatcatcatatcctttcatccatgaatacttcaaattctatctctaagagacaactccatatcacacctaaacaattaacatgaattccttaatacaactaaatatccagtcagggttcaatacccatttttttccattgggtcatataatattttttgtttgttcaaaacataaatatattatttgattacttgttcaaatcagtatcaataaatactgttccaggcatagtggcacatcacgatagtcccagccactcaggaggctgaggcaggaggacttcttttttttttgagacagggttttgctctgttccccaggctggagttcagtggtgtgatcatagctcactgtagccttgatgtccaggctcaagtgatcttcccacctcggcctccctagtaacttggaccacaggtgcacatcaccatacctagctaatttttttatttttatttttgtagagatgggggtctcactatgttgcccaagctggtcttaaactcccaggctccagtgatcctcctgtctcggcctcccgaagtgctgagattacaggcgtgagccactgtgcctggtcaaatgtgactactacttttttttttttttttttttttagacagtctcactccattacccaggctggagcacagtgtttcgatcttggctcactgcaatctctgcctcctgggtcaagcaattcttgtgctttagcatcctgagtagctggaattacaggtgtgtgtcaccacactcggctaatttttggatttttagtagagacagggtttcgccatgttggctggctggtctcgaactcctgacctcaggtgatctgcctggctcagcctcccaaagtgctgggattagtggtgtgagccaccgcatctggcccaaatgcgatttcttgaagctctcccttacctcaaagaacagagtctggctcttccattctgacagtaagcacaggtctatcattgccttcagttgccttcaggaccactggggtctgttgcagtcactttaggggattgagtctttggccacctctcagagtccttgaacagtctcagccagctgcttaggttgaatgatcaaagcagcaagtcctggcttcactgaaccaaaaatgtcccttccagaattggaagctgttctggtgttttctgcacaaaagtgtaaacatagattcaagttccagtgctttctgcatccaacagaattccatagaaggccctggctctgacctcgatggaatgcatggaagacaggaagatactcttaaacccagcctgctgcaaacacaggttacttccagcacgaaaaagttacacccgaggaggtggccattctcttctcaagaggtggtgagtctaggcccttcttgcagaagcagagctgcacatacacatctttttttttttttttttttttaagacacggtcttggtctgttgcccaggctggagtgcagtggtgcaatctcagccttctggtttcaagcagtcctcccgcctcagcctcctgagtagctgggactacgggtgcatgccagcacgtctggctaatttttgtattttttgtagagatgaggttttgccgtgttgcgtatgctggtcttgaactcctgggctcaagctatctgcctgcctcagcctcccaaagtgctgggattacagacgtaagccatcatgcccggccaaattccttatccttatctctttctctctctttttctttttctttttttcttttttgtttgttaagacagggtttcactctgttgcccaggttggagtacaagaggcaggatcacagctcacagcagcttcgaactcctgggctcaagtgatcctccctcctcagcatcctgagtagctgggactataggtgtgccactacacctggccaatttttaaattttttggagatagtgtcttgctgtgttgcccaggttggttttaactcctggcctcaagcgatcctttcactggcccctcccaaagtgttgggattataggaatgagacactgcacctgacctccttattattctctttttttttagacggagtctcgctctgtcacccaggctggagtgcagtgctgcgatctcggctcactgtaacctctgcctcccaggttcaagcgattctcttgtctcagcctcccgagaagctaggattacaggtgcacgccaccacgcctggctaattttgaatttttagtagagacagggttttaccatgttggccaggctgatcttgaactcctgacctcaggtgatctgcccaccttggcctcccaaagtgctgggattacaggtgtgagtcaccgcacccggccccttctcttttaaagtagaaaaaaaaaagccacccaccagagacataaatggcaatgcatgcatcaggcatggtgctaggaactttatacacatgtaatcctttcaaaaatagctcttttaagtaagaaaaatatgacccctccccatattaaatgaacaagggatatgaacatacaagtaatttattcaattaacaaatatttattgagcacctactatattttaggcactgtgctaaaatcaattccaatggtcaacaaatatgtgaacaaatggtaatcattattgaaggaatgcaaatgtacaaaaagtgacttttccatttttcacctattcaatggtctatattcaaaataaatgattctccaggattggatgagcgtggctttgggatctcttctactgtaggtagatgtacagctgcataatcttcctgaaggcacttgagcaatgtctatagaatggcttaaaatgcatacatatcttaaaaatggccaaccaggagcaggaagcactcctaacaacctgattgtggtttccaaatgccatttgggaaagtaccaaaatacctaaaggaaagaagagggctccttggaaaatggcgacttaaaggtgagagacaggaaatgaacaagatgaacttggaacatcttgtggtggcagacggggcaaataatcaaagaggactgggtcatagcaaaaggacacaggagccaactggaagaggctcttccacacccaacatggaggcatttgagcatcactgagggtgcaatttaaatggattgaaacacattaaacatcacacacacacacacacacacacacacacacacacacacacacacctgcatctaaatgcatcagctaccatggcagaatgctgggggagccaattcattattattatttctgagacagtttcgctcttgtcacccaggctggagcgcagtggcgcgatctcggctcactgcaacctccgcctcctgggttcaggcaattctcctgcctcagcctcccaagtagctaggattacaggcacgcgccaccacgcctggctaatttttgtatttttactagagatagtatttcaccattttggccaggctggtctcgaactcctgacctcaagtaatctgcctgcctcggcctctcaaagtgctgagattacaggcatgagccaccctgcctgacctcaactcattattatgaaaaccagtaaagagaaagaagcatttatcctgcaattcttttcttttcctttttcctttttttttttttttttttttttgagacggagtctcactctgtcgcccaggctggagtgcagtggtgcgatttcggctcactgcaacctccgcctcccaggttcaagtaattctcctgactcagcctcctgagtagctgggactacaggcacacaccgccaagcctggctaagtttttgtattttagttgagatggccgtgttgcccaggctggtcttaaactcctgagctcacgcaatccacccgccttggcctccctaagtgctaggattacaggggtgagccaaaacacccagcctcctgtgtttctttactatatcattgggtactaaatagtagctgaaggaaagttttttctttttttcttttttttttttttttgagatggagtttcactcttgttgcccaggctagagtgcaatggcacgatcttggctcactgcaacctctgcctcccaggttcaagcgattctcctgcctcagcctcccaagtagctgggattacaggcatgtgccaccatgcccagctaattttgtatttttagtagagatggggtttcaccatgttgatcaggctggtctcgaactcctgacctaaagtgatccacctgcctcagcctcccaaagtgctgggatcacaggtgtgagccaccacaccaggccagaaagtttttcttcataagaatattctagctaataaggaatgaataataagatatcgccattttgcaacctctaatgaacagatttatgaatgaaacatcaatggttgccaacatcacaaaaagagcaacacctaaatattatggcttccaatattaaccactgataaataatcttaacaaaaaaagaacctcaatttgaccagtcctctcaatctcaactaatttacaggaaatactagggatagaggagcatgttaaactacaccatgcagatgcagccggcaaaaactagacttggagaaggcaagtctacaaggcaaattatctagtttcttcaaaaaacaagaagttgcaaaaaaaaagccagtaaaggagaatagattgagaataatagagaaatacaagacatatcaactgcaatttgaggacatcatttggatcctgggaattttttataaaactgacatttatgaaacaaaaatttgaacactatcatacatgtaatggcattaaggtggtaacatcttttttttcttttgagacgcagtttcactcttgtcgcccaggctggagtgcaatggcgcaatctcagctcacagcaacctctgccttctgtgttcaagggattctcctgcctcggcctcccaggtagctgggattacaggtgcccaccaccatggctggctaatttttgtatttttagtagagttggggtttcacgttggccaggctggtctcgagctcctgccctcagatgatccatccacctcggcctcccaaagtgctgggattacaggcatgagctactgcaccaggcctgtttttttttttttttaaggagtgaaaatattttctaatgttgtcatgtgctttaaagatatgtatgaaatgtctgtggatgaaataatatatctggtatttacttcaaaaataacagagatgagagaagtgggtacacagacaaagcaagattggccatgagctgataattcttgaagctggtgatgaggccgctggagttcaatataagattctgtgtatttttgtatatgttcaaattttttcatgatagaaagttttaaaaagttactttttttttgagacggaatcgcgctctgttgctaattttttgtatttttagtagagatgaggtttcaccatgttggccaggatggtctttatctcttgacctcgtgatccccctgcctcagcctcccaaagtgctgggattagggattacaggtgtgagccgctgcgcccagccaaaaatttacatttttatctagcatttccacttctaggaatttaccttaaagatatattacacatgtacaaaataatttacgtgcaagggaaatattatgggattgtttgaaagaacaaaaaataatggaaagtccaggcacggtggctcatgcctgtaatcccagcacttttgagaggccaaggtgggtgggtcacttgaggtcaggagtttgagaccagcctggccaacatggtgaaaccctgtagctactaaaaatacaaaaattagccgggcgtggtagcaggtgcctgtaattccagctactcaggaggctgaggcagcagaatttcttgaatccaggaggcagaagttgcagtgagccaaggtcatgccactgcactccagcatgggcaacagagcgagactctgtctcaaaaacaaaacaaaaaaatggccgtgtgaggtggctcacgcctgtaatctcagcactttgggaggccgaggtgggcggattacctgaggtcaggagtttgagaccagcctggccaacatggtgaaaccctgtctctactaaaaagacaaaaattagctgggcgtcgtggcacacacctgtagtcccagctacttgggaggctgaggcaggacaatcgcttgaacctgggaggtggaggttgcagtaagctgagatcacaacactgcactccaacctgggtgacagagcgagactccgtctcaaaaaaaaattgataatgttaaataaattatgaaacacacagatgatggaatcctcaggagttgttaaaaaaaaataaggcagctatatatgtaccaatatggtctaatcttcaagatgtatgcataagcaaaaataccaatgtgttgaaatttgctatcacttgtgtaaaatatttttataaagagtacattatgcttatgcaaatattaataattattattcagatggagtctccactctgtcacccagactggagtgcagtggcaggatatcggctcactgcagcctctgcctcctgggttcaagtgattcttgtgcctcagcctccaagtagctaggactacagacatgagccaccacacccggctaatttttgtattttttagttgagacaaggtttcaccatgttggccaggctggtctccctgacctcacgtgatctgttttccctggcctcccaaagtgctgggattacatgcttatgcaaattaaaaatcaccaactatatacaagaacttggtgttagtgattgttccataaaaggtaatgtatgcaaattaaaaatcaccaactatatacaagaacttggtgttagtgattgttccataaaaggtaatggggtgggaaaggcatagagctattttatgaagattcacttatgtctgcataccatgttgtaactttaggccaggaagtggctcacaccttaatcccagcactttgggaggctgaggtgggcagatcacttgaggtcaaggagtttgagaccagtgtgggcaacatggtgaaaccccggctctactaaaaatacaaaaattagctgggcgtgatggtgggcgtctgtaatcccagctactcgggaggctgaggcaggagaatcacttgaatccgggaggcggaggttgcagtgagctgagatcaaaccactgtactccagcctgggtgagactcggtctcaaaaaacaaacaaaacaaaaaaacccaacaacaacaaattgtaactttaacaattttatcctatgactgtgctttaactattcagagtgacaaattttttttttttgagacagggtctcactctgtcgcccagactgttgtgcagtggcacgatcccggctcactgtggcctccgcctcccaggttccagtgattctcctgtctgagcctcccaggtagctgggattacagacacgcactaccatggctagctaatttttgtatttttagtagagacggggtttcaccatgttggccaggctggtctcgaacttctaacctcaggtgatctgcccacctcggcctcccaaagtgctaggattacaggaatcctacgaatcaattttgatatttttataaaaatccattctctccagattttaaaacagaaaaaagtcatgcatagtaagctatttttaaaaaatctttaccccctttctcattcataatattttttccttagatcacacttgtaaatagtcttattgtattgttaaacaaacaaccttcagatgaaatctgtttttccattctgttttcatttttaataattaatcttactgctgactttggtttatattgtaattttttcctaactttgagagttgactactcattcattcaacatgtttagtatgtgactggcagtgatgaggtgctggggatctacacatggagcacaaagccactagcttcaattctcaggttctgatgggagtacagctttggctatgctaaactagttctttttttttttttttttcttttttgagacagggtctgcacccaggctggagtgcagtggcacaatctcagctcactgcaacctccgcctcccatgctcaagcaattctcctgcctcagcctcctgagtagctgggattacaggcatgcaccactccacctggctaatttttgtattttagtagagacggggtttcaccatgttggccaggctggtctcaaactcctgacctgaagtgatccgcctgcctcggcctcccaaagtgctgggattacaggtgtgagccaccttacccggccactcttctgttaatttctaatcttctgaatttctaaccttttgattgaaggcctcataataattatgctttcccactatttttcagaataaatgatcataacaactggttatgaagacttttggatatgtgatgtattcataaggctctcctctcacatgaactccttatcagtgatactaataataaaattaatgacaatagctagtatttactgagcacttgtgtgtgataggtattacttctaaggctttacataaaatacctcatttagtcctcataaaagttctattagttagacataataatcaccacttaaaaataagtaaactgggttgggcatggtggctcacgccggtaatcccagcactctgggaggccgatgtgggcagatcacgaggtcagatcaagaccatcctggccaacatggtgaaaccccgtctctactaaaaatacaaaaattagctaggcatggcggcatgtgcctgtaatcccagctactcaggaggctgaggcagaagaatcccttgaacctggaaggcggaggttgcagtgagctgagatcgcaccactgcactccagcctggtgacggagctagactttgtctcaaaaaaaaaaagtaaactgagggacagagagtttgcataacttgcccaatgctatgtagtctataatcgggggaagtgagcactgctaagtaaagtatacgccatgatgaaaggcacagtcatagaatcttttttttttttttttctgagatggagtcttgctctgtcgccgaggctggagtgcagtggtgcgatcttggctcactgcaagctccgcctcctgggttcacgccattctcctgcctcagcctcccgagtagctgagactacaggtgcccgccactaggcccagctaattttttcatagtttttagttgagacaggtttcactgtgttagccaggatggtctcgatctcctgaccttgtgatccgcccgcctcggcctcccagagtgctgggattacaggcgtgagccactatgcccagccagaacctttttttttttttttttttttgagacagagttttgtccttgtcaacgaggctggaatgcaatggtgggatctcggcttgctgcaacctctgcctcctggggtcaaacggttttcctgcctcagcctcctgagtagctgggattacaggcacccgccaccatgcctggctaatttttgtatttttagtagtgatggggtttcgccacattggccaggctggtctcaaactcctgacctcaaatgatctgccggccttggcctcccaaagtgctgggattacaggcatgagccaccacgcctggccacagaatcttttaatcgggtcatttttgtattaggaattgtcagaaatttaacatattttgaatggcaagaagcagcttttctatattcatttttttttagcatagattatctgatgcttaggaaacagtgagtgaggcaaaaagaattcccacatttatttaattttctttgggtgtgagttttctgatgttctatgatggaagtgacaggtgttttctgacattaattacactacattaaaaattacctagtactgagccagatgtgaactccacataaaggcttatctttatcccttacactcaaggctttctaaccagtatgaattctgtagtgttcaatgagttgtgagccaagaataaatgcctgcccacactctctacattcgtaaggtttgataccaggatgaattctctgatgttcggtaagttgtgaactacgaataaaggccattccacactccctgcattcatagggtttctcacaagtgtgaattcgctgatgatgagtcagttgtgaaacacgaataaaggccttcccacattccttacattcgtagggtttgtcacctgtatgaattctttgatgttgaatgaggtatgagctacgactaaatgccttcccgcagtccttacattcatagggtctgtcgccagtatggactctctgatgtcgtgtgagctgtgcgtgctgtctgaaggccttcccacattccttacactcatagggtttctccccagaatgaattctttgatgtcgagtaacttctgagctgtgaataaagccctttccgcattccttacactcgtagggtttctcaccagtgtggattcgctggtgtacagtcagctgtgagtgctgtctaaaggctttcccgcattctttacactcatagggtctggcccctgtgtggattctccgatgcacagtgagttgggagccacgaatgaaagccttgccacagtctttacatacgtagggtttctcgcctgtgtgagttctttgatgcagaatcagctgtgaatgctgcctaaaggtcttcccacattctttacattcataaggtttgacaccagtatgaagtctctgatgtagaataagttctgatgtacgaccaaaggccttcccacagtccttacagtcataaggtttctcacccgtgtgaattctctgatgctgaacaaggtgtgaggcacggctgaaggccttcccacattccttacatccaaagggtttttcaccagtgtgaattttctgatgttgaataaggtgtgagccacggctaaatgctttcccacattcatgacattccatcagtttctcaccagtctccctgctctgacgtacagtgtgagacgtgtgatgctggaacacgggcatatgtccataggtgacgttcacttgcttaaaatagcactcttcattgacttgtctctcaaactggccttcgcattcccagtcagctctaaaatcggagccctccaggtcactgcatttaaggctttccattatctcccagttgaatgccccgatttcaaaaatgtctttttgtagaaatttctcacacctggactccaagtctgaaaaataagaaaaagataaatacaagctgtgatccttctctatgagaaataaaaaattctatagtagaggccaggcacggtggctcacatctgtaatcccagcactttgggaggctgaggcgggtggatcacaaggtcgggagttcacctggccaagatggtgaaaccctgtctctattaaaaatacaaaaattagccacacttggtggcaggcacctgtaatcccagctactagggaggttgaggcaggagaatcgcttgaacctgggaggcagaggtcgcagtgagccgagattgcgccactgcactccagcctgggcgacagagcaagactctgtctcataaaaaaaaaaaaaaaaaaaaaaaactatagtagaacagggagacaaaaataaataaccataaaaagtgaatgccttatatacatctcaaatattatgcaatttcaaaaaagcagatgaaagcacaccatgtgaagagctcacatggtgccagaagggagcaagaagacaaattaagccaggggttctaaatttgttttttgctttgagacggagtcttgctctgtcgcccaggctggaatgcagtggtacaatcttggctcacgcaacctccgcctcttgggttcaagtgattctcctgcctcagcctcccgagtagctgggattacaggcactgctaccacacccagctaatttttgtatttttagtaaagatggggtttcaccata[137 bp omitted]attaagcagtcactccccattccctattccctccagcccctggcaaccattactggcacagagctactaattctgtctctataaatttgcctattctggacatttcatgtaaataaggcatctatattttcaacacttcccaccacataaagttgatgtccatcaaaatgaaaatctctgcttaaacatttcactgccttcccatttcggtgcattaagaattaattccaaaggccaggcgaggtggcttatgccttaatcccagcactttgggagtccaaggcaaatggatcgcttgaggtcaggagttcaagaccagcctggccaacatggagaaaccctgtctctactaaaaaatacaaaaattagcaggcatggtggcaggcgcctataatcccagctgcttgggagaccgagacacaagaatcacttgaacctaggaggcagaggttgcagtgagccaagatggcactactgcactccagcctggaagacagagtgagagtccatctcagaaaaaaaaaaaagggctgggtgcagtggctcatgtctgtaatcacagcactttgggagactgaggtgggtggatcacctgaggtcgggtgttcgagatcagcctgaccaacatgaagaaaccctgtctctactaaaaatacaaaattagccggccgtggtggcacatgcctgtaatcctaactacctgggaggctgaggcaggagaatcacttgaatccgggaggcagaggttgtggtgagctgagatcgcaccactgcactccagcctgggtgacagagcgaaactctgtctcaaaaaaaaaaaaaaaaaagaattacaaactcactgccatggctcacagggctcttggcaaagcagatccctgcttgtttttgtcaccactgtgtctcagcaagagcagggcctcttcacattgaacattctcccctttcctcccagtgtacaaaaccaccagccatctatgagcatgtaaaataaatctaggccttttccatctcagatctctcatcaggttcttccatctatcaagaatcctgtcctgggctttttgctgcttttctcatccttaaggtctcagatgaaaactcactctctattttttttttttttttttgagacagagtcttactctgtcccccaggcgctcactgcaacctctgcctcccaggttcaagtgattctcctgcctcagcctcccgagtagctgggattataggtgcctgccaccatgcctgggtaatttttgcttttttagtagagatggagtttcaccatgttggccaggctggtctcaaactcctgacctcaggtaatccgcccacctcggcctctcaaagtgctgggattacgggcgtttgccactgtgcctggcttgtcttttttttttaatatttgacatggggtcttgctctgtctcccaggctggagtacagtggtgcgatctcagctcaccacaacctctgcctctggggttcaagcgattctcctgcctcagcctcccgagtagctgagattacaggcatgtgctgccacgcccggccaatttttgtatttttattagagacaaggtttcaccatgttagctaggctggtctcctgaactcctgacgtcacgtgatccagccgccttggcttctaaaagtattgggattacaggcgtcagccaccatgcccggcaaaaactcacactttcaagaaagctctcagcctgacagccctaaacacacgcctttatcctttctcccatttcttgtactctgtaacacttttgttgtaattagattttcatttacatattcatctgctgttctgtttgttttcttgttcctgaatcttccccaaagatggaaatactgcctttttcactaaccattgaaaccaacccagctgggcgtggtggctcatgcctgtaatcccagcactttaggaggctgaggcaggtgggtcacttgagctcaggagttcgaaaccagactgggcaacatggtgcaaccccatctctaccaaaaacacaaaaaattagctgggcatggtggcaggcacctgtgtttccaggtattcagaaggctgaggtgggaggatggcttgagcccagggacagaggttcagtgagccgagaatagtgccactgcactccagcctgggcaacagagcaagaacttgtttaaaaaaaaaagacaagacggcatttgtcagattggataaaataccaaaatctaggtgcacagtagtaacaagtaacacactttaagacatgaagacctaaggtgtttgaaaataaaaggtgtggccgggtgcggtgactcatgcctgcaaccccagcactttgggaggctgagatgggtggatcacctgaggttgggagtttgagatcagcctgaccaacatggagaaaccctgtctctattaaaaatacaaaattatctgggcatggtggcacatgcctgtaattccagctactcgggaggctgaggcaagagaattgcttgaacccagggggcggaggttgcggtgagccaatatcgtgctattacactccggcctgggaaacaggagcgaaactccatctcaaaaaaaaaaaaatagactttaaaaacagaaatcatcattttgggttaagcagggtagctctataatcaagaaagtaattccattcagcaggaagatttatgtttctaaagttatatacacctaatagcctcctaatatatatatttatttttatttattttttgagacagagtctcttttttttttctgagacggagtctcgctctgtcgcccaggctggagtgcagtggcgcgatctcggctcattgcaagctctgcctcccggattcacgccattctcctgcctcagcttcccgagtagctgggaccacaggcgcccgtcaccacgcctggctaattttttgtatttttggtagagatggggtttcactgaccaggatggtctcgatctcctgaccttgtgctccgcccacctcggcctcccaaagtgctgggattacaggcatgagccatggtgcccggccgagacagagtcttgctctgtcgcctaggctggagtgcagtggcataatcttggctcactgcaacctctggctcccaggttcaagtgattctcctgcctcagcctcccgagtagctggggctacagccgtgtgccaccacgcctggctgattttttgtatcttttagtagagaaggggtttcactg[140 bp omitted]agaaattaacaaaatcgtcatcttggagatttcaattcacctttctcagaaatag[133 bp omitted]acacggtgaaacccgtctctactaaaaatacaaaaaattagcctggcatggtgttgtgcacctgtagtcccagctactcaggaggctgagacaggagaatcacttgaacctgggaggcggaggttgcagtgagccaagatcccgccactgcactccagcctgggcgacaaagtgagactcaagggcttcaaggaaaaataaaagagagagagaaaaaaaaattaaaaacaaaaaacaaacaactccaagaacagatgagggggccgcatgtggtaggtcatgcctgtaaccccagcactttgggaggctgaggcgtgcaggtcagttgaggtcaggagttcgagaccagcctggccaatgtggcgaaaccccgtctctactaaaaatgctaaaatcagccaggcatggtggcgggtgcctgtagtcccagctactcaagaggctgaggcaggagaatctcttgcatctgggaggtggaggttgcagtgagctgagatcatgccactacattccagcctgggcaacagagtgagactccgtctcaaaaaaaaaaaaaaacaaaacaacaacaacaacaaaaaacagatgagtgaataaacaaagtgtgtatataatatgtacacatgtatattagtatttatacatgtatacatctacatacacacatacaatggaatattattcagccataaaaagaataaaattcagagacattctacaacttggataaaacattatccttagtgaaataagccagatacaaaaggccacatactggatgatttacatgagatacctagaataggcaaattcatacagacaaaaagtagaacagaggtgaccagggactggaggaaggaaaatagagttattgtttaatgggtacagagtttctgtttgggatgatgcataagctctggaagcagagtgtataatgctgtgaatgaactaaatgccactgaattatctacttagccaggcatggtggcatgtgcctgtagcaccagccacttgggaacctgaggtgggaggatggcttgaaactgggaggcagaggttgcagtgagccgagatcgtgctactacactccagcctgggcaacagagccagaacctgtctcacaaaaataaataaataaatattatgtaattttttttttttttgagacagagtctcgctctgtcgcccaggctgggagcgcagtggtgtgatcttggctcactgcaacctccgcctcccgggttcaaacaattttcctgcctcagcctcccaagtagctgggattacaggcatgtgccaccatgcccggctaattttttttttttgtacttttcatagagatggggtttcac[131 bp omitted]ttaaaaatctaataaataaaagattattatttttcagaactgcaagaaattagaaaacacaccaaccaaatattctgtgaaagacaagaacacttttatggaatcaacagcaataggcttaatattttaatacggaattacagtagagtcgtacccataaagttgtttttgttttattttgttttgttttgtttttgagatggagtcttgttctgttgccaaggctggaataaagatgcgcgatcgatcttggttccttgcaacctccgcctcccgggttcaagcgattctcttgtctcagcctcccgagtagctgggattacaggcacctgccaccacacatggctaatttttgtatttttagtagagatggggtttcaccatgttggccagactggtttcgaactcctgacctcaagtgatccacctactggtctcccaaagtgctgggattacaggtgtgtgccaccgcgcccgtccatacattgttaatttatgcatattcaattaactttgctaaaaaaaatacatacagaatgtggtaggtgggataacggcactcaaagatgtctgtgtctttattcctggaacctatgaatgttgtcacacagcaaggggagttggaattcagattgctaatcagggcagggcacagtggctcacgcctgtaatcccagcactttgtgaggccgaggagggtggatcacctgaggtcgggagtttgagaccagtctgaccaacatggagaaaccccgcctctactaaaaatacaaaattagccgggcgtggtggtgggcgcctgtaatcccagctactcgggaggctgaggcaggagaatcacttgaaccagggaggcggaagttgcgatgagcggagatctcgccattgcactccagtctggacaacaagggcgaaactccatctcaaaaaaaaaaaattaaaaaaaaaaaaaggctaatcagttgaccaccacaagatggcgagattatcccagtttatctgggtggacacaatgtattcacaagggtccttggaagtgaaagtgggaaggccaggtgcggtggctcatgcctgtaatcccagcactttgggagttttgggaggcctaggtgggtggatcacttgaggtcaggagtttgagaccagcctggccaacatggcgaaatcctgtctctactaaaaatacaaaaattagctgggcgtggtggcgcactcctgtattcccaactacttgggaagctgaggcaggagaattgcttgaacctgggaggctgaggttgcaatgagctgagatcgtgccactgcactccagcctgggtgacagagtgagactctgtctcaaaaaaaaaaaaaaaaaaacacataaaaacaaactttttctgtgaagggcccaatggtaaatgttttagggtttgttgaacacataaagtctctacagcatattctttttttttttttaacactttcaaaatatcaaaactgttcttggctctagggctgtatgaaaaactggttatggactgcatttgacccacagattgcagtttgccgacccctggtctagggcacagggaagtaaaagatggtatggtaaagatgttaaggtcttgctttgctcagaaaaagttcaaagatatgatcgatttcctaccatttttctttcttttttttttttttttttcccgagatggagtctcactcctgttgcccaggctggagtgcagtggggcaatctcggctctcagctacctctgcctcctgaaccatttttcaataaaaggaaccagcattcttttgagaactggctgatttcagggctgaggcaggaaaaatctgaaataaccatggaacatgctgtggtaccagaaaatgtggaagtatataaaagagaatgtgggtgtgttgagagaacccaggagccaagcttaacgagttttcaagggccaaagcctgaacgattcgagcaatgaaataaacaatgaaagtagtgactacagcccatagaataaaataaatacccacgaactcatcgtgatataaagaaatcattgaatgaacaagtgaatggaagagggctagggacagttcttccttattgaagaattccaattaataaatggtgaaggaataagggacacagaaaatcaacattagacaagtgacagagtaataactggtgcagacaaggtccagtgatggatgccaaaatcggagtgggaggaggaaaagcagcacatttgcctagtgtgaaagtatttcgccataagatatttatcaattacggatggaaacttcacaggggagaaacaagacaggccctatcttaccaagtgatcaaactgaacagcacctatcttttttttttttttttctgttgcccaggctggagtgcagtggcgtgatcttggctccctgcaacctccgcctcccgggttcaagcgattctcctgtctcagcctcctgagtagctgggactacaggcacccgccaccacgcccagctaatttttatattttcagtagagacggggtttcaccatattggccaggctggtctcgaactgctgaccttgtgattcgcccgccttggcctcccaaagtgtgaacagcacctatcttaccaagtgatcaaactgaacagcaccagtaataagccatgttgatgtctgatatgtgatatacagagaagaacataacatcacttctgtgatattcttgctaaaatgcagaatctcactgtgagaaaacattagacaaacgtaaagtgagagacaatctacaaaaaaatactcattaagaggatcagctggctgggtgcagtggctcatgcctgtaatcccagcactttggaaggttgaggtgggcaggtcacttgagctcaggagtttgagaccagcctggccaacatagtgaaaccctgtatctactgaaaatacaaaaattatccaggtgtggtagcgtgcacctgtaatcctagctactcaggaggctgagacaggagaattacttgaatctgggaggcggaggttttagtagagatggggttttaccatgttggccaggctggtcttgaactcctggcttcaagtgatcttcccaccttggcctcccaaagtgctgagattacaggcatgggccactgtgcccagccaataaaatggttttttttttggtttgttttttgagatagacgttcacttttgtcgctcaggctggagtgcaatggcatgatctcggtttactgcaatctccacctcatgggttcaagagattctcctgcctcagcctcccgagtggctggaattacaggcacccacaaccatgctcagctaagttttttgtttgtttgtttgtttgttttttgagatggagtctcgctctgtcgcccaggctggagtgcagtggtgtgatcttggctcactgcaagctctgcctcctgggttcacgccattctcctgcctcagcctcctgagtagctgggactataggcgtctgccaccgcacccagctaattttttgtatttttagtagagacagggtttcaccatggtctcgatctcctgacctcgtgatccgcccgcctcagcctcccaaagtgcagggattacaggtgtgagccaccacgtctggccaatttttgtatttttagtagagacggggcttcaccgtgttggccagggtggtcttgaactcctgacctcaggtgatccacccacctcagcctgccaaagtgctgggattacaggcatgagccaccatacctggccaagaaaataagtttttcttttttctttttttttttttttttgagacagagtctcgctctgttgcccaggctggagtgcagtggcgcgatctcggctcactgcaagctccgcctcccgggttcacgccatactcctgcctcagcctcccgagtagctggaactacaggcgcctaccaccacacccggctaatttttttgtatttttagtagagatgtggtttcaccatgttagccaggatggtctcgatctcctcacctcgtgatccgcccgccttggccttccaaagtcctgggattacaggcgtagagccactgcgcccggccaaaaataagtttttctaagggatgaagacacttgtagaaaaaaggatctggctaggtaccatggttcacacctgtaatctcactttggcctcccaaagtgggaggatcgcttaagcccaagagatggaggctgcagtgagctatgatcacgccactgcactccagcatgggtgacagagtgagatcctgtctcttaaagaaaaaggatacaaagtacaggtaaaaagttggccactggggaagaaataggtacatctctttttaaaaagaaaggaaaatgtgagagaacagagaccagagaggaattaatgggagtaggccaaggttctcttggaagctgacgctaataaagtctttactcgccacatcttcacgtttcaggcctttcttccacagtagggctttgagggaacttcccacagtaactcaagttactcctgtcagtcgactcatccagggaccttcccctgtcgaaatcggccctcgcttacctgggcaccatggtcctgtcacatcatttgcaatcatccagggctctttcccttgctccaataaggagacgacatcaggcttagaaatggagagtcctgtttacaggaaaagaaatggggtgtgatcagaccgctccaaaatccaaacccagttccctggtcaccatggaaaagacgcaattacaaggtaggtggaaggttgtccaaaggataggaagaccgagctgcccagcagaatgacttgtttctagttccacaaagcacaaaacaatttttcagtcaccagaaattcagtcagaaacttgtaagttgccctagaaattcataatgaagaaaccagaaattccagaagggtagtcctgaattatgtggagtaaatgtgtggtgatcactctccatgaacccctccttcccctccaatctattccttgatgctcctggccttgttctgtgcccagctctgggatcccgacagctcaccgtaaggactgcattacccatgccctatggcttctcattggctttggcagacagaaagcatcagctggagatcagtggacaggaggagagagagcaccaggcatttcttaccctcctctctccctcctttgacccaggagctctggaagtagctacagctattgctggccgggcctctctctatggctgtagtttgtagcgtctcctgtgacagtttcctctcctcacccatttaggcagagatggaaactgcaccccatggttgtagtccctgttgccttgctttccgtctggcccgtgtgatacaatctccttacctagtgaggccaagtgaccaaagttctccagagtcacctccctgtacaagtccctctgagcaggttccaggcacttccattcttccagagagaactctatggccacgtccctgaatgtcaccagtccctgaaacaataaacccacgcattagtgtacattaagaaacttttttcatttattatgaaaattttcaagatgcacaaaagtacagagaatagttgacagtaatggccccccgatatgcaccagtctgcttcaacagttaacaaggtgtaccctgttttatctcttcccttctatcttttattccccatgtactgtgaggcaaatcccacatgccaaacatcataatacttcacccacagatactttagtatccaacagattatcaacaacttctcttagaaaaacacataataatcagaatatcattatcatacttaataaaagtatcaataatttcccagtcaacagattaaattctaattgccccagtgttctcaattttttttcttttctctttttttttttgagacagagttttgctcttgttgcccaggctagagtgcaatggcacgatctcagctcaccacaacctccgcctcctgggttcaagtgattctcctgcctcagcctcccgaatagctgggaccataggcgcgtgccactgtgcccggctaattttttgtatttttagtagagaaggggtttcatcatgttggtcaggctggtctcgatctcctgacctcatgatctgcacgcctcagcctcccaaagtgctgggattacatgcgtgagccccgtgcccagcccacctgacccattttaaatgaggttaaaattgatgagtagggtcaggttttgacaagctaatttatccaggaaatatcttaatgagaagatgaagaatttttttttttttttgagacagagtctcgctctgtcacccaggttggagtgcagtggcacgatcttggctcactgcaacctcttcctcctgggttcaagcaattcttctgcttcagcctcctgagtagctgggattacaggtgtgcgccgccacacttggctaatttttatatttttagtagagatggggtttcaccatgttagtcaatcttgaactcctgacctcatgatacgcccgccttggcctcccaaagtgttgggatgacaggcgtgagtcactgcacccagcctaattttgatttttaatattttgtttggtagagacagaatctcactatgttacccaggctggcctcaaactcctggtcttaagtgatcctcctgcctcagcctcccaaagcactgggattacaggcctgagccactgcactcggccaaggacattggaggagatgaagaagggtactggaggaaggaggtaatgaagcatgacagaatctacagctgcaggcctgtggcatgaaggaagtataataagcacagttatatgactagaggtctatatattcttgagcattcctgtggctacacataaactatctgcagacagcaggacacttctatcttccatggtctgggaatgatcaggaaagagctaagtggggtcccataaataagcgaaatagtgaaatacacaaaacacacagcaaacctgggcctgg[136 bp omitted]tggtaattccagcactttgggaggctgaggtgggtgaatcacctgaggtcaggagttcgagaacagcctggccaacatggcgaaatcctgtctctactaaatacaaaaaattagctgcgcgtggtggcaggtgcctgtaatccaggtacttgaggggctgaggcaggagaattgcttgaacctgggaggcagaggttgcagtgtgctgatttgtgccaccacactctagcctgggcaacaagagtgaaactctgtttaaaaaaaaaaaaagaagtccagcctggtcaacatggcaaaaccctgtctctactaaaactacaaaaaattagccaggcgtggtagtgcacacctgtaatcccagctacttgggaggctgaggcaagataataacttgatccccggaggcagaggttgcagtgagctgagattgtgctactgcactccagcctgggtgacagagcgagactctgtctcaaaaaaaacaaacaaacaacaacaacaacaacaaaacccccaaaaaagaaattagctgggcatgatggtgcgtgcctgtagtcccagctactagggaggctgaggcaggagaatcgcttgaacccgcgaggtggaggttgcagtgagctgagattgcgccactgcactccagcctgggcgacagagcaagaccccatctcaaaaacaatataaataaataaataagaatgaaagaaggaagagagaaggaagttagaaaggagggcaggcaggcaggcagaaagacagagactgttattggttgcataatatcgtatgttatgtcttgtaagatacgtcgattccattattttcgtgcacttagcttaattaagatgtgtatgttaaagtggcttatatctaaaagagaggcaataacaaatgctagtgaagacgtgaacagaagggaacccttgtacactttgttgggaatgtaaatcagtaaaatcactatgcagaacaacttggaggttcctcaaaaaactaaaaatggagctaccttgtggaccagcgataccactgctgggtatctacccaaaagaaaggaaatcagtaggccaggcgtggtggctcacgcctgtaatctcagcactttgggaggccaaggcaggcagatcacctgaggtcaagagttcgagaccagcctggccaacatggtgaaaccccacttctactaaaaatacaaaaaattagctgggcatggtagcgtgcgcctgtaatcccagctacttgggaggctgaggcaggagaatcgcttgaacccaggaggcagaggttgcaccactgccggcatgggcaacaagaatgaaattccgtttaaaaaaaaaaaagaaagaaagaaaggaaatcagtatatcgaagagatatctgcactccatgtttgctgcagcactgtccacaatagccaagatttggaatcaacccaagtgtctgtcaacagatgaatggataaagaaaatgtggtacatatacacaatagagtactatttagccacaaaaagaatgagatctggtcatctgcaacatgaatggaactggaggttattatgctgcatgaagtaagccaggcacagagagacaaactgcatgttctcacttatttgtggatctaaaaatcaaaacaattcaactcatggtcatagagagtagaaggatgattactgaaggctgggaagggtagagggaggctgagtgggaggtggggatggttaatgggtacaaaaaatagaaagaataagacctactatttgatagcacaacagggtgactatagtcaataagaacttaattgtacattttttttttttgagatggagttttgctttgtcatccaggctggagtgcagtggcatgatctcggctcactgcaacctctgctctgggattcaagtcattctcctgcctcagtctccagagtagctgggattataggtgcccaccaccacgcccagctaatttttgtattttttagtagagatggggtttcctcatg[137 bp omitted]tataactcaaaggataaatgcttgaggggttggataccccattcttcatgatgtgcttatttcacactgcatgcctgtatcacaacatctcatgtactccataaatatatataccatgtactgacaaaaattaaaaattaaaaaaatttaaaaacacaagatgtgtaaaatcttcagggtttattatacgcttgctaatattcacattccttcactgtccacttttccttgctcctgaaaccagaaagctgatggagggtatacctgagttacataaatgtggcccacaaccaacacatatgttcaacctcaaaatggaccattttatggttattcatctcatacatatccttgcaagactgaagagtgttccgtcactgaagttcccaatcacagcccccttcctaaaggtctcacaaaacagatgttaccacatacagagaccaacaccaatcactacaactcctaccatgtctatgtggagagagaaggctgtgggcttctattgcaaacaccctgataatgggtaaaacataacacccttttaaatgaatttctttctttctctttttttttttttttttttgagacagggtctaagtctgtcgcccaggctgcagtgcagtggcatgatctcggctcactgcacttctgcctcccaggctcaagagattctcctgtctgagcctcctgagtagctgggactacaggtggcatgccactgcacctggctaactttcgtatatacatatcttttgtagagagagggttttcccatgttgtgcaggctggtcttgtactcctgagctcaggtaattcacctgccttggcctcccaaagtgctgggattacaggtgtgagccaccatgcctaactttgtgttttaaaatttaaatttaaatttttgtttgtagagacggggtctcaccccagctggtcttgaactcctggtctcaagcgatcctcctacctcagcctcccaaagtgctgaaattacagggtgagccactgggcctggccagaacttttcttaatgatggttatatctatcaacattttcccaccttagaaattaaaagaaagaaatataatttttttttttttgagacagagtctcattctatcagccagtctggagtacagtgatgcaatcttggctcactgcaacctctgcctcccaggttcaagcgattctcgtgcctcagtctcctgagcagctggaattatagacatgcgccatcatgcccggctaatttttgtattttcagtacagacagagtttcatcatgttggtcaggctggtctcgaactcctgacctcaggtgatctgtctgcctcagcctcccaaagtgctgggattacaggtatcagacaatgcatccagccgagaaattttaaaaatattttaacaacaaataaacctgttacctgttaatatcagtaacatacattttatgaaacataactctattgtcaaaatcaaaaaatttagtggcattgttttacatttttgtaaatatctttaatgactggccaactaaaagaaagttggattttttttttttttgagatggagtctcactctgtcacccaggctggagtgcagtggcgtaatctcggctcactgcaacctctgcctcctaggttcaagcgattctcctgcctcagcctcccgagtagctgggactatagacacctgccactgcacccagctaatttctgtatttttagtagagacggggtttc[131 bp omitted]ctgtgtcgcccaagccggagtgcagtggcgtgatctctgcttatgacaacctcggcctcctaggttaaagtgattctcctacctcagcctctcaagtagctgcgattataggcacccaccaccactgcacccagccatataaatatatatatatttgacggtattaagtgtcttgtgactttttaaagagggggtgacatttaaaaatagaataaagaataaagcagtggctcatgcctgtaatcccagtactaggaggctaaccaattgagccccggagtttgagaccagtctgggcaacacagtgagacctggtctctacaaaaacttaaaaaattagctggtagtggtggcatgtggctctggtcctagctacttgggaggctgaggtgggaggattgcttaagcccaggaggttgaggctgcagtgagccatgactgcaccactgtgctccagtctgggtgacagagcgagaccctgtctcaaaaaacgaaacaaaacaaaaacacagaagaaagaaaccacccaagacaatggaaaagatgaaactactttatttcatgtttggccccattcaaccacagttatgataagggagactctcatatttctctcaagagaaggtatttctactgtactggtgctctgctaagagcatttatttatttatttatttagacagagtctcgctctgtctcccagggtggagtgcagtggggaaatcttggcttcctacaacctccatctcctgggttcaaacgattctcctgcctcagcctcctgagtagctgggactacaggtgtgtggtaccatgcccggctaatttttgtatttttagtagagacggggtttcaccatgttgtccaggctggtctcgaactcctggcctcaagcaatcggcccacctcagcctcctaaagtgctgagattacaggcatgtgccactacgcctagcctatgctctgctaagaggactacagacacgtggacagtgctggagaggagagggccaccgagggacttgggcaccattactcatctcctggaatggaccaactgtgagaaggatacagggaagttccaggataaagaacacagtgtccatataatctggcgggaagacagatcattctaaggatagaaggaatttcaacatacctgggccatggcttttagaactatttgacctgctctgatttctctggattcttctcttggacaagtgcagagtcctgaaaaagcaaaatggggggagatggggtaacctctgataaactgagcttgcctcagcactcccaaatagatgagcttaaaagaattgtacttccaatgtctcggatctgcttctcccacctctccatgtcctaccacacaagaactaacattaagaactacagagttggccaggcatggtggctcacgcctgtaaacccagcaccttgggaggctgaggcacaagaattgcttaaacctgaaaggtagaggttgcagtgagccgagactgcaccactgccctccagcctgggcgacagagcgagactcgatctcaaaacacacaaacaaaaaacaaaacaacaacaacaacaacaaaaaaaaactgcagagttaagaaaacccagtcccttcctaaaaagtaaggaacccaaaagcagaaagatggtttcaaggcagatgtgctccagcactgacacagaacccaggcaccaccaagggagggattacagctgacacagtcccccatcttagtgatgctaaacttggccctagatggggcctagaaggctcccacctgctccaaattacagcaaggatcttacgactcagactcactcacttgacccctaaggatgaggacagcaccatcaggctaggaacacagaccatctatgcaggccaaatcttgagtaaaagacatccctaaacgaagtcttctagcttctctgggctcaacaggcaaaacctcctgggcatctcactggctccacttcctccttccaagtccaaaatgggactacaccatgcataccataggctctgtcaatgtctccagccccagctatactcaccagacaggagcaagaaagcctcagtaatacaggcatcttgcttgcatacccgcacatccagagtactgccctccatgggaactcaatttctagaagtctcttggcccagcactctttatttctcatctgagccctccctactgctttcattcttttttaaaactagacagctgggcacggtggctcacacctgtaatcccagcactttgggaggccaaggcaggtggatcacctgaggtcgggagttcgagaccagcctaatcaacatggagaaaccccgtctcaactaaaagtacaaaaaattagcggggcgtggtggcgcattcctgtaatcccagctactcgggaggctgaggcaggagaatcgcttgaacccgggaggcagaggttgtggtgagccgagatcgcaccattgcactccagcctgggcaataaaaacaaaactctgtctcaaaaaaaaaaaaaaaaaaagacaagtacagtagtgagaagagggggaagaatagaacaaggagttcaattcataactgactgtgaacaatcaatggagataactcactaccttccgaccatctactgcttttctgcagaacatcacttccccattgactgtgaggctggcagttgctgagtccgaagtcctgtgaatggcatacatctcaagggaatgagaaatcagagttttaaggagggttctttttttccttttgagacagggtctcactctgttgcccaggctggagtgcagaggtgtgatctcagctcaccgcaacctctgtctcccaggttcaagtgattctcccgcctcaacctcacaagtagctaggagtacaggcgcacaccactacgcctggctgattttttgtatttttagtagagacgcggtttcaccatgttggccaggctggtcttgagctcctcacctcaggtgatccgcccaccttggcctcccaaagtgttggggttagcagggtatgagctactgtgcctggcctaacaagggtattaaatctgatctaattagaggtccaagaagcttcctgtagggggtgtgtcaaaagaaatacttttttttttttttttgaaatggggtttcactctgtcaccaaggctggagtgcagtggcacaatctcggatcactgcaacctctgcctcccatactcaagcgatccttccacctcggcctcccaagtagctaggaccataggcatgcaccaccacgcctggctaatttttgcatttttggtacagattgggttttgccatgttggccaggctggtcttgaactcctgagctcaactgatctgcccacctcggcctccgaaagtgctgggattacaggtgtgagccaccgagcccagctaaggaagactaacttaatgaatgggaatggtgtcaagaaaacttttctgtaaaatgtagaataggaattgggttctgaaacctcagggaagtttaataggcagaaaagggacagagaatattgtgagcagagtgaaatgcagtggcaaaaacactggactgaaagcaaatggtgtatttgggagactaagaatgatttggaatgagttgtgtagtttgaagaaaggtctagaccagtgctgtccaaataatgttctgtgatgatggaaatcttcaaatctgtgctataaatattgtagtcatagatggctattgagcatatgaaatgtggctagtatgtctgagaaactaaagtttttattttattttaattaatttaatttaaatttaattagctctagaatctagaggcagataatgctggagatgacatcaggggttagaaaatgaaggtgtataggccaggtgtggtggctcacgcctgtcatcccaccactttgggaggccgaggtgggctgatcacctgaggtcaggagtttgagaccagcctggccaacatggtgaaaccctgtctctactaaaaatacaaaaattagccaggcacggtggtgcgtgccggtatccagctacttgggaggctgagatgggagaactgcttgaacctgggaggcggaggttgcagtgagccaagatcacaccactccactccagcctgggccacagagtgagattctgtctcaaaaaaacagaaaagaaaatgaagatgtatgaatgaaaaaaccatgagggcaaggaccagtgggtctgatcatcactctaaccatcactcttgccacagtgtctggaggacataggtgaccaataaatacaggctgatgcataaaagttaggttctttgggaagctgaggtgtgtcgttcgcttaagctcaggaatttgaaaccaccctgggtaacatagtgagccctcatctctattttttaaaaaaggtaggttttcagccgggcacggtgcccacgcctgtaatcccagcactttgggaggccgaggcaggcggattacctgaaatcaggagtttgagaccagcctggccaacatggtgaaactgcatctctactaaaaatacaaaaattagctggcatggtggggggcgcttataatcccagctactcaggaggttgaggcagggagaattgcttgaactcaggaggcagaggttgcggtgagccgagatggcaccattgcactccagcctggggaacagagtgagactctctctccaaaacaaaaaagaaagaaaaagtaggttttcacttattaatgaaatggaaggaaacctaagaatttaaagacagaagtgacaggaccaatatggccaggttattttggagaggtgtaaccttggagtcagaaagattgactgagaggtacttgtacttttcagatgtaggggtgggttgcccctacactttttcaggcacgaagagggcctgacccaggacattggcagcagaaaagaggaggagagagatgaattcaaaatgtagatgagattaaatcaacaggctctggcatctgacacatatggaggcagagaaaaggaagtcagaattctttcatatttactgggctcctgtgtcaactggcactgttctaggaacgaggaaagaaaataattcaagtccctgtcccagttgatctcacattctgtttttttttttttcttttttttgagacaaaatcttgctctgtcaccgaggctggagtgcactgacgagctctcggctcactgcaacttccacctcctgggttcaagcaattattttgcctcagcctcccaagtagctggaattacaagcgtgcaccatcatgctctgctaatgtttgtaacttttgtagagacggggactcgtcatgttggccaggctggtcttcaactcctgcctcaagtgatatccccacttcagcctcccaaagtgctgggattacaggtgtgggccattgtgtctggctggacctcacatcctatgggaagagacaaccaacaaacactgacatacggagatagatgggattgagggctgggcacagtagctcactcctgtcatctcagcactttgagggaccaaggcaggaggataacttgaggtcagcagctcaagaccagcctgggcagcaaagtaagacccccatctctacaaaaaatttgaagaaaaaaaaaagaaaaaagatgagatgtgagtatttagggtggtatggccatagacatgatattgatattcctaattatatgtcaggtggggccaggcacagtggctcatgcctgtgatcccagcactttgggagggcgaggcacgcggatcacttgaggtcagaagttctagaccagcctggccaacatggtgaaatgccgtctctactaaaaatacaaaaaattagctgggtgtggtggcgcatgcctgtaatcccagctactcaggaggctgaggtgagagaatcacttgaacccaggaggaagaggttgtagtgagttgatattgtgccactgcactccagcctgggcaacaaagactctgtcacaaacaacaacaataacaacatatgtatatatagatgtcaggtggcaaatgtcctacagataaaaacaaagaagattaaggggagagggagttttggaggaagagagggtggtctgagaaggtgacaggtaagcacagcctgaatggatgagtgagaaatgcaggtatctggggaagtgcacgccttgcaccaggagcggcaattgcaagggtctgaaggcaggagcaggctttcctcgatcaacaagaggaaggagacaagggcagctgggatggaacatgcgagacgaagagggtcagagagagagctagaagccagatcacaaggagcttgtaagccactgtaagaactttggattttattcttaaggaaaacaggaaggtacgaaacttttaaagccaaggaatggcataatctgatttatatttaaaaggggcggggcacagtggctcacgcctgtaatcctggcactttggaagatcaaggtgggcggatcacctgaggccaggagttagagaccagcctggtcaacagaagccctgtttctactaaaaatacaaaagttagctgcgtatggtggtgagcacctgtaatcctatttactcgggaggctgaggcatgagaattgtttgaagccaggaggcggaggttgcggtgagccaagattgtgccactgacaccagcctgggtgacagagtgagactccatctcaaacaaaaaaaaaaatacataacaaacaaacaacaaaacaaacaaacaacaacaaaaagaaaagaaaagaaaagaaatgggtcttagccagtgtggaagacattactatgtttcaccattatccagtttggggcacacagaaaatgacattttccagccccttgcacttaggtagggccatgcactgctctagccaatgaaatctcagctgaggtgatgactgtcacttcagttagagacagacaccagaaagactgcacaattctccaatttttctcttcatgcatgtggtgaccatctgtttttcaaatgatgcagctaaaggtggcgggccttctttggtgtggaaccctgtctctgctgatccacactggacatgtacatgagcagaaataaaatgtgactctgtaagccactgagattcaggggttgtttgccaccacagcataacttagcctgtcctaaccagtacacaaattaggccatactttgactagataaaaattcagactcagacgcttggtcaatatgagaaagagcaatttttaaaaagaggaagcttcagaaataagagcagagctgtccgattccagctctatatgtctcaaagggatttttcacaaacccataatgtgaaacaaaatgtgaattatgagttacaggacaatttttttttttttttttggcagggcagggacaggatctcactctcacccaggctggagggcagtggcgcaatcacagcttcagcctcctgggctaaggtgattctcccacttcagcctcccaagtagctgagaccacaggcatgccactacacctggctaattttaaaattttttgtaaagacagggtctcaatatgttgcccagtctggtcttgaactcctggccttaaatgatcctcccacttcagcctcctaaaatgctgggattgcaggtgtgagccactgtgcccagccaacaagttgattctgacccagcaaaaccatgctgttttagagctccaacatcaaaactttgtacaaatccttctggaaagttgagctatctctacaccacctagtaaaacttgaagctacgtgcctaaatgttccccatctctgcaattcacagacattctttagggcctgggatcccacatcacaagggcctaggctcaggggctgagataagttggccaagttatgggagctagacaggtacaggaatctccatcttaaccttagtaatctcttcctgaaaaagcaatcactctgagtaaaaactctaacaaaagcctttttcccaatgtttttattatttatttttttgaggtagggtctaattctgtcactcaggctgcagtgcagtggcatgatcacagctcattgcaaccttgacctcccagactcaagagattctcctacctcagcctcccaaatagctgggactacaggtgtgcatcaccacgtctggctagtttttaattttttgtagagatggggtttcgtcatattgcccaggctggtctcaaactcctgggctcaaacaattttcccacctcgacctcccaaagtgctgggattacaggcgtaatcatttacgcctgtaatttaccctaaaatggtaaattctttgttatgtttatttaaccataaaaccaagaaagtaacattattggttactgaaataggtaagtgggaactgggtagaaagaacaaagaaccggggctgggcgcagtggctcacacctacaatcccagcactttgggaggccgaggcggttggcaacttagtgaaagcccatttctacaaaaacacaaaaattagctgggcatgatggtggatgcctgtaatcccagctactcaggaggctgacgtgggaaaattgcttgaacccgagaggtggaggttgctgtgagccgagattgcgccattgcacgctagcctgggtgacagagcgggactccgtctcaaaacaaaaacaaaaacaaaaaacaaaaaacaaaccaacaaaaaacaatgggcaatgggattgggagagaagaaatgatgactcagtaaatccttttgtctgattctgacttttagaacaatgtgattgtttcacatactcagaaaaatcattaaattcaaccaggatgtgaggggaacccaaaataaaatacaaacagtaataaatgaacaatctatattacacataaatattatgaatacaaagggtttagggaagaaagtagttttagaaaactgtattttcactatatactgtaagactaaagacaaaaagaactgtatggtacatggaagtcagcaattcttaaattactttttacacaggactgagcaaatatatttatatatattaatacatataatggttaataaataaattatattatggttaatgtgagccacatttttcaatgtcaaagaaaggagttacaaaaagggaaatggaggcaagacatggtggttcacatctataatcccagaactttgggatgccgaggaaggagaatcacctgaggccaagagctcaagaccagcctgggcaaatagtgaggcccttgtctctacaaaaaatcttaaaattatatttaaaaaaaaggaaatggaggccaggtgtggtggcttatgcccgtaatcacagcactttgggaggcagaggcaggaggatcacctgaggtcaggagtttgagaccagcctgactatcatgacgaaaacccgtctttactaaaaatacaaaaaaaattagctgggcgaggtggtgggcgcctgtaatcccagctactcgggaggctgaggcaggagaattgcttgaacctgggaggtggaggttgcagtgagccgagatggcaccattgcactccagcctgggcaagtaaaattctgtctcaaaaaaaaaaaaaaaaaaaaaaaaatctggaaatggagagaaggctagaatgaaccctgtagtgttgcactgaaattggagatactatatgaactcatgaattatttgtatatacatacatataaacacatttcatagctgagaggacctagaagcaatgacatctcagaagcaatgaagatatctaaccttggtttcaaaaaatcatttttttttttttcctgagacaggctcttgtttcatcacccaggctggaatgcagtggtgtaatcttggctcgctgcaacctccgcctcccgggctcaagcaatcctcccgcctcaacctcccgagtagctgggactacaggtactcgccaccacacctggctgaaaaaaaatcattttctaataaaaggaaccaatggtccccgggaaatttgtagattccaggactggggcagggaaagtaccacatcaacgtggaacaccttgtggtgccagaaaataaataataaaaatagtaaataaagaggccacattgaaaggacacaggaatcgacttgaaggggctcccagtggccaaatgtgtgataatttgagcaaaaaaaaaaaatgatagcaatgaatatataacctatagaataaaagagattataacctatagaagaaattccagtctatacttatagaaataatttagtaaataaaaaaatgggaaagaagaaaaatatctttctaacagtaagattctaattaataaggccaggcgaggtggctcacgcctataatcccagcattttgggaggccaaggtgggcagatcacctgagatcaggagttcgagaccagcctgtccaacatggtgaaatcccatctctactaaaaatacaattattagccgggcgtggtggtgtgtgcctgtaatcccagaaacttgggaggctgaggcaggagaatcgcttgaatccaggaggcagaggctgcagtgagctgagatcatgtcactgcattcccagcctgggcaacaagagccaaactccaactctctctcacacacacacacacacacacacacacacacacacacaattctaattaataaacatagaagtggccgggcgcggtggctcacgcctgtaatcccagtactttgggaggccaaggtgggtggatcacgaggttaggagatcgagaccatcctggctaacacggtgaaaccccatctctactaaaaatacaaaaaattagccaggcgcggtggcaggcacctgtagtcccaactactcgggaggctgaggcaggagaatcgcatgaaccagggaggcggagcttgcagtgagccgagctcgcgccactgcactccagcctgggtgacagagcaagactctgtctcaaaaaaaacaaaaaaaaaaagaagaaaaaataaacatagaagtgatgatggaaacaaaccccaaaaccccaccatttgacaaatagctggtaacaactttttcaggcaagcgtcatcaacggataagactaatagatgaaaggaggataagaaacgggatattcacataggcttaaagtatttcttcacaagacatgtatcaattataatgggaaaaacagtgactttgcagcagagaaatctggcaatcaccgtcttaaccaagcggttaaaattaataccactcatagtgtaacgaattgacctcgtgggtccctggcatgatgcgccgagaagggtacatcgctttcggagtattcttgccccaaaggcagaatctgaatttaatcaacaggaaatatcagacaattccaaagagaggaacattctacactgcagactctacaaaacaaatggccaacatggtgaaaccctgtctctactaaaaatacaaaaaattggctaggcgtgtcaaaggagttacaaaaaggaaaatggagaccagacatggtggttcacatctctaacccagcactttgggatgctgagggaggaggatcacttgaggccaggagttcgagaccagtctggccaacatggtgaaacccccctccccccgtctctactaaaattacaaaaaatcagctgggcacgatggcatttgtctgtaatctcagcttctcaggaggctgacgcaggagaatcgcttgagcctgcgaggtggaggttgcagtgagctgagatcacagcactgcactccagcatgggtgacagagcaggactccgtctcaaaaaaaaaaaaagagcaaatgggaattctattgttgctacattttaaagtcttaaattcaaaatgaaaagtaaagaaaaaaatttaaaagaacattaggtatgcagggagcagggaggatataggcctttcagtccatctccaaggcacgcagtaaattactcctatggcaaatactggagaccaggttactttggtaggggtgagggtggtggtggggtggttctgaagtttcagaagaaggaaagaaaagcatgtcctgaaaaacaagaaggatttcagagaaataagaataaaacctgatgtacttgaacttggcacctttcttggagaagggttaagagcaaggaatcatgaacaaccaggtcatttttgaaccaccatcctccttacctaccatatagggaagtgtggtcacagaacaccaggcatctgcctaaatccagtgtcactcagaaggctgaggtcactcctgtccagggccagaatctgtcctaacttcaaaggttctgcatgggtcaagcactagagtcactggcacacttggtgctgcacatacagtcagtgtcacacaaacataaccacacatccactcttttatttttttgagacagggtctcgctctgtcacctagactggaatgcagtggttcaaacacggctcactgcagccttgacctctcaagctcgagatcctcccacctcagcttcccgggtagctgggaccacaggtgtgggccaccacactcagataatttttaattttttgtttgtttgtttttgagacgaagtctcgctcttgtcccccaggctggagtgcgatggcgcgatctcggctcactgcaacctctgcctcctgggttcaagcgattctcctgcctcagccccctgagcagctgggattacaggcacctgccaccacgcccagctaatttttgtatttttagtagagacagggttttatcgtgttggccaggctggtctagaactcctgacctcaggtgatccacccgcctcggcctcccaaagtgctgggattacaggtgtgagccaccgtgccagccattaattttttttttttttttttgtacaggccaggctggtctcgaactcctgggctcaagtgatcctcccacctcggcctcccaaagggctgatgtgagccaccacacccggccctacatccactcctgagacacaggacacaatcacagacacctctatacctttccagtcacaatatctttccagtcacaatcacacacccgctaagacacacccagtcacacaatctactctccactgtgatacagttactcccgtatagtcacaagccccacacaccaacacccacaaatgcctcatatagtcacagtcacacacccactcaggggacacacgccatcactggtactttacggcacccagtcacaactgaactttcactgtggacatacacacagtcacactcacacaagcaacccacacaagcagtggcaccccactcccgcatacacagcaccacacacatacacacaaacacacacaccaagggatacaggaatacacaagcggcgtcaccacacagtcacaggcacaggcaattgcacacggccacagtgtcacacaaccaaaaccacgcacacaccttggagacatgaatcacaaccgcacacccgcagtggtcacacagtcacaactgtactcacaccccaggaacagggcgaacaggccacatatacaacggggacacacgcagtatcacccccggtcacaaggaccctgcaccccgatactctctatcacacatggttacacaaaaaccaccagacaccctggagacaggcggttacacgtgcacagttgcagacacccacacccagccacacagccacaaagacacattcagaacggcgcatccgcagccagctcccgcctgcgcgcacagattcgaggctccggacacgccccggccccgcccaggactcccagacccctcaccttctgcctcccctggtcgcgtccgggtccttgcggagctaactagctcgccacgacgtcaagaacgacgtaacgtcaggccgctgtgggctctgggaattgtagtccagagctagatcggccacggacagaatggcgttctcttatctctgagtcggggcctggctcgttttgacatttttgcgcccacgagtcttcggagagggcgtcgccactccagaccttccagcaagcttgaagtcatctgacgctaaaggactacttacctcaagagctccatcgtcacagaaggaggcggccaagttcgcggggggaggggaggagacagagagtcgaccagtaaagcctcaagggaaatgtagtccaaggcctgagaagcgacgttgctggtaatagaaggtaattcagtaccagcctgggcctggccgcggtgaccgaggcgggccgcgtcgcggagacttctgggagtgcttcctcgctctccgagtgcgcaagcgcagcgcaccgagtggacattttggtctttgtccgcgggtcagtacggcccctgggtccacgtggcgcgaaagtaggaggtgggatctgggcgtctcgggtcggtcggaccggggaggttaaaggggaggattcctgatctttaggggcgcggcgcgagggcagggagtgggtgtaagagcttctggcctacgtgcggggcggagatgggggcctctgaggcgggtttgagcgagtgtgaccgagtttgtcctcaaagtttgacctgatgtttgggattgttgagtgaatgtgaaactgggtgcgggattgtgtgtgattgtgcctaagagggagatgtaggagaccagcattgaggtataacgtttgagctgcacttcccttgtcgaaagtgctgataattataacggtgccatcttcctggagcgtcttttttacttgaaaattgaaggggtggaaaagctaagtggtgaataattttaaaacgagtttttatataaaagcatttctttttaattggagtggcatgcaaatcaccgtgacttttttttttaattaaacgagagtgtttcgaaggaactttagtttcggggtgcctacttcagactattcaaatccccatctttggggtacttaaatagggctgttaagcaaagccctagactaaacagcattgtacgctttgagaagcaatcccatataacggcgcccaggatgagggagtcaacggttttaggttaggcacagttatcctcattttttgaagaaagcttaattgttgcagtgtttatctatgagtctggactaaatcctaggtgtcttaattccttaatgagtcgaggcgttctcaggttgtatggattttgtgaagtaatggagaatgctactgacgtctccaaagatgcgttttctaaggaaatcaccccgcccccgctgtcgtcattgacatagttttaaattacaaaaagttaaataaagtaattgggtaccaagttaatatctataaataaatagccttctaatttacaaatatcagttagaatacatagttgaagaaaactaatatttacaatagcagtaaaaagataaagtattgtggaagaaacttaaaggttcagaactattaggaaagaactttaaaatactactaaggggcataacaaatgtgaacaaataaatataccatgtgacattaagaagtgtgcgcaaacttaagtgaatgtattaatttactgtgatcttggtcgggtgcggtggctcatgcctgtaatcctagcactttgggaggccgagatgggtggattacctgagatcaggagttcgagaggagcctggccaacatggtgaaaccctgtctctactaaaaaaaaataaaataaaaaaatacaaaaattagccgggcgtggtggcgggcgcctgtaatctgagctaccgcggaggctgaggcaggaaaatcgcttgaacctgggaggcggaggttgcagtgagcccagatctcgccactgcactccagcctggacaagagcgagattccgtctcaataatagtaataatgtgatcctaataaaagtatggacaggcttttctcttttggaactaggggaactgatcctagacttactatggaaagagacaagctgcaagagccagtacagactgagaaagaaaaggcgttgaggtgtggggagatggggacccaacacattttaaatataaagcctcaggccgggcttggtggctcacacctgtgagccaaggcaggaggatggctagagtccaggagttagagaccagcttgggcgacatagtgagatctcccgtagtcctagctgcttgggaggctgaggtgggaggatcacttgagcctaggaggtcaaggctgcagtgagcagagatcctggcgacagcattccagcttggtggacagccagtccctgtctttttttttttttttttttttttttgagatggagtctctctctcttgcccagtctagagtgcagtggcccaatctctgctccctgcaacctctgccccccaggttcaagcgattctcttggctcagcctcccgagtagctgggattagttgcctgccaccacacccggctactttttttgtatttttagtagagacagggttttaccatgttggccaggctggtcttgaactcttgacctcaagtgatcggcccgcctcggcttcccaaagtgctaggattacaggcatgaaccacggtgcctggccgaccctgtcttaagaaagaaagaaaggagagagagagaagaaagaaaagaaaaacagttcatgcccatcagtgggagattggtgtacatcgatacaacaaaataatacatagctgtacaaaagaatgaggaggaagctctttatatactgagacagaaataacttcaaaatgtattgttaactgagagaaagcaaggtgcagaatgtagagtatgatacacgatgcatttggaataagaaaaggggtaataagaatatgtatttataatcccagcactttgggaggccaacgcaggcggatcacctgaggtcaggagtttgagaccagcgtgaccaacatggagaaaccccgtctctactaaaaatacaaaattagccaggcgtggcggcacatgcctgttaatcccagctacttgggaggctgaggcaagataattgcttgaacccgggaggcggaggttgcagtgaacagagattgcgccattgcactccaacctgggcaacgagagtgaaactccatctcaaaaaaaaaaaaaaaaattcaaaagatacatacgaaataataaaactggctgttggggtgggggtactggaatagacagggcaaaggctttgtatttttagtagagacggggtttcaccatggtgaccaggctggtctcgaactcctgacctcatgtgatctgcctgcctcagcctcccaaagtactgggattacaggcatgagctaatttttttttttttttttttaaattaaaggaagacataggccaaggagccagacttcctgtgttaactccttcctctgccactttttaccttggggacctcaggtaggtacttaaaccttgggcctcagttgctcatttcatagtatagaaataatagcaatatttgattcaaagggtggttgtgtagctccagaagttaatacatgtaaagttctaagaatagtccccagtgtgtagtaagtacttgattaatgttaaatactagtactttttattactagctgcaaaaaaaatgcttcctcagaaaatattatagtcctgtgtctggtaggaatttctgaaagaataagatatgtagatgcacttttgttattaatatttcttttttttttttgatggagtctcactgtcgcccaggctgcagtgcagtggcctgatctcggctcactgcaggctctgcctccctggttcatgccattctcccgcctcagcctcctgagtagctgggactacaggtgccagccaccacgcctggctaattttgtttttgtatttttagtagagatggggtttcaccgcgttagccaggatggtctggatctcctgaccttgtgatccacctgcctcagcctcccaaagtcctggcattacaggcgtgagccactgcgcccggcctaatatttctatattttaatttttttacttaaaattttctttttttttggtggagggggggacagagtctcggtttgtcgcccaggctggagtgcagtggtgctatcttggctcactgcaagcttcacctcccaggttcacgccattctccagccttagcctcccaagtagctgggactacgggcgcccaccaccacgtccggctaattttttgtatttttagtagagacgggatttcaccg[136 bp omitted]atcaggaagttaggtttgttttttgatttttgagatggggtctcactctggctcaggctgggtgcactggtgcgatcacatctcattgcagcctccacctcctgggctgaagagatcctcccacctcagccccacccccgcagtggttgggactacaggtgtgtgccaccacgacctgctaatttttaaacctttttttgtagagatggagtcttactatgttgcccaggctggaagttagatttctgtgtttgagttatgtttatctttagaaagtcatcattatccgctcctttggaagatttgttctttgatttctatgattacttttgcatggttctaattcagaatctctgatgattttttttttaattctaattgtgattgatttttggccagaatacatcagaggtgatcttacatacttcaaattgcataccattaggagagatataccagatggctggtgattgttacttccctttgaccaaaatgttatgtttactttggttcattctccatcagtcatttagtggatggttttaaaaccaatacataattcttggctggatgagtaaatttctacaggtattgtaaagtgatgattttctgttttttttgttgttgttgtttgtttgttttgtgtaaaaatgtagtagtctatacgttaagagaaacttctgggaacaaactagaaatgatccctggaagtatagtcttaatttctcttgtcttttcattccttttacatttgtttcattgttacatcaaattgtatctttttttccccctggctttttctttcttaaacatcatcctaaagttgtgtatatttagcgtgttctagaatcagctgcactttttgatgccagtggataccccttcaggtcattcttgtctcattttggctgacatcattgatcttggaaagttttcctgcactgcaggcttgtatcttcctcccagacttggaattgaccatttctccaaggagctctggttccttttattggagaatggtattagagacaagatcaagggtgtgctcattgcccaggggtaacattgttttaaggccattttaaattgcagagcatttaaaaaatacatttttaatgtatttttaaaaatcatgagtccatattcgtatttctaattcactttaaatggtatagtatttttacctaatttcttagctcctagttcttttttttaatttaattttattttatttttgagacggagtcttgctctgtcgcccaggctggagtgcagtggcacgatctcagctcactgcaatctccgcctcctgggttcaagtgattctcctgcttcagcctcccgagtagctgggactacaggtgcatgccaccacgcccagctaagtttttgtatttttagtagagatggggtttcaccgtgttagccaggatggtctcgatctcctaacctcaggtgatctgcccaccttggcctcccaaagcgctgggattacaggcgtgagccacggcgcccggcctcctagttgtattttatagtaaaaaatatgaaacaagttataagtacttattttgtttgctttatcctgcaatataaagaaaatggtttcagtaacaatgctgatactagtagtaaccataaacatactgtatcatgttaaaaaattctttctttaatatatgtaactatttttgttcttaaaatgcatcttttttttttttttgagatgttgtcttactcttttgcccagggcagagtgcagtggtgtgatcttggctcacttgcaacatctgcctccccagttccagcgattctcctgcctcagcctcctgagtagctgggattacaggtgcccaccatgacgcctagctaatttttgtatttctagtagagacagcgtttcaccatgttggccaggctggtctcgaactcctgacttcctactcgtcttggcctcccaaagtgctgggatttcaggcatgagccactgagcccagcttttaaaatgcatctcactaaagatgtatgtagtcaaagaactctgttctaaagtcatttgaaatcgtttttctgaggaattatgttactaaattaacatacagttgggttcatttgttgttttcaggttaagggactgcttttttttttttttttttttttgagacggagtctcactctgtcccctaggctggagtgcagtggcgcaatctcggctcactgcaagctccgcctcccgggttcacgccattcttctgcctcagcctcccgagtagctgggactataggtgtcagccaccacgcccggctaattttttgtatttttagtagagacgaggtttcaccatgttagccaggatgatcttgatctcctgacctcgtgatccacccgcatcagcctcccaaagtactgggattacaggcttgagccaccgtgcctggccaaggcactactttttaaaaaatgaatttgattactattgaagtaagtaatgcatttctgtgattcaacaaagatctatctcacagagatatctcattctgctcccttcccccagtcacattcttctttgtcttatgtaaacatgtcttgtttttttttgtttgcttcttgtttatccttcaagtgggttttttgttttttgttctgtcactattatatatttctcttcactcctgtttccctccaccttacataaaagatagcataccacatgcacctccctatatctcactttctttaataacagtatgtcctagagatagcccttccttttttctttcttttttttttttttttttttttgaaatagtctcgctctgtcacccaagctggtgtgcaatggtgttaacatggcatactgcagcctccaactgctgggctgaagtgatcttcctgcctcagccgcctgtgtagctgggaccacaggcacactccaccacacctggcttttttactttttgtagagatgaggtctcactgtttcccagattggtctcgaactcctgagctcaagcagtcctcctctcttggcttcccaaagtgttgggattacaagtgtgagccactgcacccagccaaggtgttccttcttaatcataatctttaaaagaaatttttttttcagctgctgtataaataagatgtcattatttggatgcaccatggttgattcagttaatcccgttgttgagcatttggattgtttccagtcttctgctgttgctaacaatgcagtaatgaataatttttttatgtgcgccattttatactgacacaggagtagctctaaactagactgctattaatacaaatggcgctgcccagtgggtaagtacttacactcccacaagccatgtgcgagagcgtcttccccttaaactcaccatgagtgtagtgtcgaatatttggtatttcgctagggacataagagacaatctgaacttcagtgtaggtttcatttacatcccttcttatgaatgagaatttttttttatatgtttaaaggcctgtatgtattaatctaggaactgtctattcatatccttttcaccatttttctatggggtgtcttctccttagaggagctgtttataaattagaaaggttagccctgtatgaaatgagtggtggctttttttttttttttttttgaagttttcatttgcatttggacattgttcacagtggtttcttttttttttaatcttgcagaaataagaggttttgttttaatttagtaataatagtttctttttttacatagccgtgcttagaatgagccccctgtggttggtgagcacagagacatccccgcaccacaccaaagacctttttattcatgtattttttagaggcacagtctcactgtgttgcacaggctggccttgaacccctgggcccaagcaagtctcagactcccaagtagcggggactacaggcagtgcaccac[139 bp omitted]gtgaaaccccgtctctactaaaaatacaaaaaatttagccagtcattgtggtgcacgagatcacaccactgcactttagcctgggcaacagagtgagactccgtctcaaaaaaaaaaaaaaatctagttacatttttttctttttgagatggagtatctctccgtcccccaggctggaatgcagtggtgcgatttcggctcactgcaagctccgcctcccgggttcacgccattctcctgcctcagcctcccaagtagctgggactacaggcgcatgccaccacgcctggttaattttttcgtatttttagtagagacggggtttcaccatgtta[135 bp omitted]gtttcaccgatattttcaaattcttataaagttacagttttttgttgtttgattgttttagagttggatcttgatctgtcacccaggctggggtgcagtggcgtgatcacagctgactgcagccttcatatcctcgctaatttaaaaaaaaaaaaattgtagagataagatctccctgtgttgcccaggctggtctcaaactcctgggcccaagtgatcctgctaccttggcttcccaagtcagagcaatagtttttttaagattttgtttttattttaatttataatccatttagattttatcctggtgtatgctatcagatatgcatccagctttacctttttccaattggctaccacgttctttgacatcatttattaaaaggtcttacctggctgggcacggtggctcacgcctgcaatcccagcactttgcaaggccaaggtgggtggatcacttgaggtcaggagttcgagaccagcctggccaatatggagaaaccctgtctctactaaaaatacaaaacattagctgggtgtggtggcacatgcctgaatcccagctattcggaggctgagacaggagaatcgcttgaacataggagggcggaggttgcagtgagctgagattgtgccactgcactgcagcctgggcaacaagagccaaactccatctcacacacattaaaaaaaggtcttatgtttactatttttaggatgccactttgattatatactaaattctcacatttatttggtctgtttctgggtgtgagcagaaagactgaggacactgctatagcccaggtgtaacaaccagggaaaatatttatctttttactattgaggctttatcattgtgttttactttgtggtatagctagtctcttaattgctcgtccttttcagtgtttcctggctattcttgcctgtttatttttctttgtaaattttaggattagcttgtctcgttccagagggggaaaaggtagaactagtttgttacttttattgggattgcattaaatttataaaataacttgggaatagggacatttttatgacattaaatattcctctttatgtacgtgatacgtattctcgtttctttttgggtcctctagggtgttttaaaatttttttcatacaggtttggacacttcttactaagtttatttctggatgttttgttttatgttgctatgaatggagtcattgttggcatatatgaagctgttgatttctacatactaatattattccctgctttccttagttatttgtaattagattatataattgaggcagtaggcatccttgtctgtttagaatctaatagaaatgccttcagtgtttttctattacttttattatcatgatttgcttttcagtgtttttacattagataagatactggcttttgtggtcagatacagattatgattatataaatatagattacccatgctgcctgggtcagtgggagtgtgagcagaaagactgaggacactgctaatagccaaggtgcaacaaccagggaaaatctgttgattgaggaaacaacaatccctcaaaatttcgttattgcatccttaaacaaaaaatcaaatgggacaaaaataagatgtctattcctattcttctgttttctgtcgattcccttcttttgggtgactgtttctttactcatttcctctgtttatcttttgtggtctatttatagctttgcttccttcttaaaagttttgtgtcttaagttcattttgttatgtttcagttttcatctgctttgtgattcttacttttttttttctggctcactgcaacctcaacctcctaggctcaagcagtccttttgtctcagcctgtcaagtagctgggactacaggtgcataccaccatacctggctagtttttttgtatttttttttagtgctaagcacgctggtcttgaactcctgggctcaagcagtctacccacctcagtgtctcaaagtgctgggattacaggcatgagccaccaagccctgcccctgctttgtgattcttttttttttttttttttttttttttgagacagggtcttgctttgtcacccaggctggagcacagtggcatgatcacggctcactgcaacgtccacctcccaggcttaagcagtcctcctgcttcaggctcccaagtagctgggactacaggcatgtaccaccccacaccctgctaatttttggatttgaattttttgcagagatggggtcttgccatgttgcctaggctggtcttgaacttctgagctcaagtgatcctgcccacctcagcttcccaaagtgctgggattagtggcatgagccactgcgtccagcccacggtaacatttctccctgtgtcttcagcagcagtaatagtctgacaactggcaagttcccatttctgttctagccctattctgagctcctgatctgtatatccaactgcctaatcgatctctctgcctgcatgtgttcagaaacctacactctgaatgtatagagtctcaaacttgatctccctcctgcaagttgcttccagccaactcaccttctcgtgtttctgtcatgtatgtttcggtttaaatcatgctctaagccttatatctctgacacaccccattaggaattgggtgatcaagctttttcaacatacatagtggatggggggtatatatgtgaaacttaaattttttatgattatgcttttttatatgattacaactttatagaagagttggaatagtacagagaagtcccatgtatcctttacccaatttcaccaatcatttacattttggttgttttatttttccttctctctttctccaaatgtgtatgatttttttttcctgaacgatttgaaaccagttgtggacatgcttcctttatctataaatacttcagcatgcattttgcaagaacaaaaacattctttttcataactacagtacagtgatcaaaatcgggaagtttaacattgatacattagtattatttaatccaaagtccatattcaaatttggtcagtcatcccaataatgtctgctattgattaaaaaaattcttttgggccacgtgcagtggctcacaactgtaatcccagccctttgggaggccaaggcaggtggatcacctgtggtcgggagtttgggagttcagcctaacacagagaaactccgtctctactgaaaataaaaaattagtggggcatggtggcgcatgcctatagtcccagctgctccggaggctgagacaggagaatcacttggacctgggaggtggaggttgcagtgagccgagatcgcaccactgcgctccagcctgggcaacaagagtaaaactccatctcaaaaaaaaaaaaattttttttttggctgggcgcagtggctcacacctgtaatcccagcactttgggaggcagaggtgggcggatcacctgaggtcaggggttcaagaccagcctggccaatgtggtgaaaccctgtctctactaaaattacaaaaattagctgggtgtagtggcgcatgcctgtaatcccagctactcgggaggctgaggcaggagaatggcttgaacccgggaggcagaggttgcagtgagcagagatcacgtcactgcactcccagcctgggcaacagaacgagtctctgtcacaaaaaaaaaaaaaaagatttttttttttcttttggagtgcagtggctattcataggcatgatcatgtatttgcagcctggaagtcctgggctcgagtgatcttcctgtctcagcctcctgagaagctggtactgcatgtgcacaccaccacacctggcttaaaaatgttttttgaactaatggatgaacctgtattccaggttgttgcttttcttttttatgacaaggtctcactctgtcaggccatcttgaactcctgggctcaagtcatcctcccacctcagcctcttaagtagctgagactacaggcgcacaccattgcgcccagctaattttgtatttttataaggacggtgtgtcactgtgttgcccagcctggtcttgaactcctgcactcaaaacgattcacccacttccggcctcccgaagtgttgggattataggtgtgagccactgcacctgggccaggacatctctaatatgaaataggacacggcacggtggcttacatctgtaatcccagcactttgggaggctgaggtgggtggatcacctaaggtcaggagttcgagaccagcctggccaacatggtgaaactctgtctctactaaaaatacaaaattagccaggtgtggtggtacacacccataatcccagctactcaggaggctgaggcaggagaattgcttgaacccaggaggcggtggttgcagtgggctgagattgcacaattgcactctagcctgggcaacaggagtgaaactgtctcaaaaaaaaaaaaaaaaaaagaaagaatttcactctcagtataatgcaaagagggtaaataggacttcaggaaaatgtttgagtttttattcttgagtactgtcagaacaacttcttcacattgtgcccatgtgctttagttctgatgggaacgtgttaaagtcagacatgggtgttgaattcatccacgaataagggctgtagttaaaatcctctcaggaccctgagtgggagtgtggtgctagagaaaaacagcaatcactcacacaaggtgtgaacagctctcctgtgtaagtaaaattctgaaaggtaattctccctttctcccatttctggatgtgtgtagactttaaatggtttaatgagcatggctttgaagtttaggattctaatggccctagtccctttgcccacatgattgtgtgtgctttagtcactaaggcagaaggtcattactttgttctgtgcatctttggaagttgcaccctcattcttcagaaggccaggagaccccagggctcagcctgagttctaggatggtactttggacccagcattaacattgtaatactgtgtcattttcccaatagttaatatgatcctctgttgaagcaagaagacaaactgtatggtggagaaagaagtgggaaggatctgcgcgggtgagtaaatgacaggcaggccacagtttttcagtcagcattgagtcctctgaagtgcttcaaaggatgttttcttccaggctgtagacatatagagtattgcttggtatgagatttttagattcctgaatgacgcttccagtcatcatttttgtgtgtttcattattcttcttctttcaccagattctagaggggccaggcgcccctcctgttgctgttctgatgtcagccttcctgcttcgtctgtgccgccactgtggtggctgttctccttcatccacataccttttcctgtcctcacacattgtcctttatactttgtaaaaccttacatattgtctgatattcaggttcctttttgttactaccttctctcatcctttctagtggctgaatgcctcagaattatattttacacctgttctcacacttcccgttgtcttctcactcatctctgccatcgtagatccatggactcctctgcctacctttcttctgctcccatgtacctctgtcataagttgttgacctagaaatcagtttttccctctgctacttttatgtgtgggggtctatatgtatggcacaattacagctcactgtggcctcagcttcctggcctgaagtggtcctcctgcctcagactcccgaaaaaatctcctcttaactcttgactcttagtcctgcagtttttttgcaaagttgtggtcacgtttacgcgtgtcacgtatatccttcttgaggtaacctaggaataagccagtatattatatctatgctgcaaatatatatacatataagccctaatttttccttttcatataaatggtggtatattatatattctattatgtacataagtttttttcttagaattctctgtcaacacataatttgttatttattttcatttttttgagacagagttttgctttgtcacccaggtggcagtgcagtggcacagtcttggctcactgcaacctccgcctcctggggtcaagtgattcttgtgcctcaggctcccgagtagctgggattacaggcatgtgccatcacacctggctaatttttgtatttttcatagagatggggttttgccatgttggccaggctggtctccaactcctatcctcaagtgatctgcctgcctcggcctctcaaagtgctgggattacaggtttgagccaccgcgcctggctaacgcataatttaacctgtctcctactaatgggcatttaggttgttttcaggcttctgctattgaagacacaagtgtgtatacttgtttatattgctttgcagaaatatgcagaaacaactacatagcatttactttttaagtggaatacagggtcaaagttatgtttataaatttaattgagataagcacattgctctcaaaagaagtaaacccatttacgtttctaccaagctgatatattcacatcctacaagtatttattgcatgatatgtattaggtactatttcagatgctagggaaatgtcagctatcaaaacagtcaaaaatttcttcctcctagggacggtgttataatggggagacagacaatgagtaaatacttaaaaaatgtatactatcagatagtgataagtgctatggaaaagaataaagtaagggaaaaccggtatagagagggctagttggggttgtaattttaaatcagcttggtggggaaaggtctcactgaatgccatttgaaaaaagatctgaagagtgcgagagtgggcgtgcagcattgggtggaagatcattagccagaaggaacaaaagtgttaaaagccctaagtcaggagaagcttgctgtcctgttcagagaatagtgatcagggccgtgggctggaagagagagggcaaaagggaataagagtagcagtggttaggtaacaggtcaaatcacaggtttcaacattgattctgagtgatttgggagacccaacagagggccagccttccttccttttccttttcctttttttgagactgagtcttgctctgtcacccaggctggagtacagtggtgcgatctcggctcactgcaacctccactttccaggttcaagcgattctcctgccttagcctcccaagtagctgggattacaggcacctgccaccacgccggctaatttttgtatttttagtagagtcgaggtttcaccatgttggctagggcttatatgtatatatatttgcagcatagatataatatactggcttattcctaggttacctcaagaaggatatacgtgacacgcgtaaacgtgaccacaactgactttgggaggccaaggcaggtgtatcacttgaggccaggagttcgagaccagcctgaccaacatggagaaaccctgtctctactaaaaatacaaaagttcttcttttttttgagacatagtttcactctgttgtccaggttggagtgcggtggtgccatcgtggctcaccgcagcctctgcctcccgggttcaagtgattctcctgcctcagcctcctgagtagctgggactacaggtgcccaccaccacacccggctaatttttgtatttttttggtaaccagttttcaccatgttggccaggctggtcttaaactcctgacctcaagtgatctgcccgcctcagcctctcaaagtgctaggattacaggcgggagccactacacctggactcattcttaagttataattaactataatatcaattcttattttggcatctccagagtttctgtcttgccttacacaactttacctgtttatgggacagacagctgtctaatttcattctcattgtgtcagaatgctacccaaattaaaattttcatcctattattttcagatccagagattacctcagaccagtttcatgttatttctggattatttcttttcccatggtctttgtaataggatcagtcaagccttaaaaagacacactaagctctctttaatagagaacaaagggccaggcacggtggctcacatctgtaggcgaggcggcagatctcttgagcctaggagttctagaccagcctgggcagcgtgttgagaccccgtatcttttttatttaaaaaaaaaaaggccagactcggtggttcacccctgtaatcccaacactttgggaggccgaggcaggcagatcacctgaggtcaagagtttgagactggcctggccaacatggtaaaaccccgtttctattaaaaatacaaaaactagctgggcgtggtgatgcacacctatcgtcccagctactcgggaggctgaggcaggagaatcggttgaacctgggaggcggaggttgcagtgagctgagactgcactccggcctgggcaacagagcgagactccatctcaaaaaaaaaaaaaaaaaacatacaaattatgtgactacaaatatgaacatatttctttctctttataaaatttttgaatcttggcctttgattatgaaatattctacttatgtaggtactacttatataaacttgaattcagttttcattaaaatgtttgttacttctgccttttttcctcttccctctgcttgtccattacttcatattttccagaggaacttacaagttctcagcaaatgataccttaaacatggttttagattttgccgtctatagtctgcattataatccggttaaaaggaaggtccatgttttatttttctgatcagtagtttgagaacgcatgagttgctgttaaataatctatgaattttttgtgtggaaatactgatcagttcttttttcttttttcttttttttttttttcccgagacatagtctccctctgtcacccaggctggagtgcagtggtgcgatctgggctcactacaacctccacctcccggtttcaagtgattctcctgtctcagcctcttgagtagctgggattataggagcatgccaccacatccagctaattttttgtatttttagtagagacgaggtttcaccatgttggccaggcttgtcttaaactcttggccccacagtgctgggattacaggtgtgagtcaccatgcccagccattcaattattttttcatatgaacattttttaaatataacaaatgctgaaggaatagttaaagaatctcttatgtaccccccatgtggattgaataattaatattttgccacgcttttgtatgtccgtatccatgtgtttattttgtgtgctgaggcatcatgatgttttacttctaaaaaattaaatatgtattttctaccaagaaaagcagctcctggccaggcgtggtggctcacgcctgtagtgccagcacttgggaggcagatacgggcagatcaccagatgtcaggagttccagaccagcctggccaacatagtgaaatcctgtctctactaaaaatacaaaaattaggcgtggtgatgcatgcctgtaatcccagctacttgggaggttgaggcttcaagaatcacttgaagccaggaggccgaggttgcagtgagtcgagatcgcaccactgcacaccagcctgaaggggtgggtttcccctccacagctgtgggcgtttctcgtcaggtggaaggactgacttggaaaagaaagagacacagaaacaaagtatagagaaagaaaaatgggcccaggggaccggcgttagggaggacctgcatacggaggacctctcaagaggaccggcctcttgagttcccttagtatttattgatcattatcgggcgtttctcggagagggggatgtggcaggacaatagggtaatagtggagagaaggtcagcaggaaaacgtgaacaaatgtctctgcatcataaacaaggtaaagaaaaaagtgctgtgcttttgatgtgcatatacataaacatctcaatgccttaaagagcagtgttgctgccagcatgtcccacctccagccctaaggcggttttcccctatctcagtagatggaatatacaatccagctttacacggagacattccattgcccagggaagagcaggagacagatgccttcctcttatctcaactgcaaagaggtcttccttttttactaatcctcctcagcacagaccctttacgggtgtcggactgggggacggtcaggtctttcccttcccgcggggccatatttcagactatcacatggggagaaaccttggacaatacctggctttcctaggcagaggtccctgcggccttctgtagtgtgttgtgtctctgggtacttgagattagggagtggtgatgactcttaaggagcatgctgccttcaagcatttgtttaacaaagcacatcctgcacagcccttaatccatttaacgctgagttgacacagcacatgtttcagtgagcacagggttgggggtagggttacagattaacagcatctcaaggcagaataatttttcttagtacagaacaaaatggagtctcttatgtctacttctttctacacagacacagtaacagtctgatctctctttcttttccccacacagcctgggcgacagagcaagactgtctcaaaaaaaaagggagctctcccatataacaaaataccgtttcacaccttagaagattaaccatgttgtcctaatattagactacccagtctatgttcacatttttccaattgtccccagaatgccttccatagttttttaaaattacagaatgtaatcagggttcaagctttgcatctggttgctcgccaccac[134 bp omitted]gcccggccagccagcatcttttgtcttcagctgcagaatggtgctgcaggtcttaccatatatgtgggtttaatctctgatttccgtatagcagctcattcctgtcatctcatttgctgaatgcccctgagctctgattaaaattctgcaggggataaacttccatttcatatgaaggtgtgtccagtcctttgttctcgtgactggacagtgcatgttcaactgttccttacacttttttttcagccaccatcctttattccttttgaataagggaatttgtaccattttctccttataattttaatggggttttgggaggaagcacttgttggttgatctattccttttcttagaaagatgagcattatttagccaggtatggtggtgcacacctgtaatcccagttactcaggaggctgaggctagagaattgcttgaacccaggaggcggaggctgcagtgagccgagatcgcaccactgcactccagcctggataacgagcgaaattccgtctcaaaaaaaaaaaaagaagaaagaaagatgaacattatttttcttccttagcatcccaggtagactttctaattttcatctttttcttctatttggcaattcttcattatttgttatacaacttgctaaattctgaaatggaaaggttatttttcaagagtactttcagctttgtggacccatgaatgttaattttctacctagatcacctcaagtagggttcccttctcataatttagttggaagcattaataatatagattattttcatattgggagatgggctaccagagttaatctcaaaaaattttattgctagtaatgggaaaattaacaaataaaagtgatagtaatataaaggtaaaatgaagggcttaccatatggcagccatggttctgggcactttatgaatttaactcctttgtgctatggttctttgtactccattttagaagaagcctgagaagatgatgcacagatagagaggcaccaggacttgagaggcaccaggacttgggaggcatgttgatccatctccaggaaagactgagaaaaagagcgttgaatataagaaaaaatacttcctctgttctcagatcgtatttgttttaaggccacacctttttgaagttttcagtttgaaacacaacctggactgaaatcatgagggaggttgtgtaggaaagaatcatcaagggacttagttgggagcttctctaccacagcttactccttatggtattaaccccctttaagtgtaaatgtctttggtttaaaacgtttgtacctcatctgttaccagagtgttcatactggagagaaaccctatgaatttactgaatgtgggggaactgttactcatatgttgcatttcgtcgaacgtgcaagtcatgctgaagagaaaccctgtgcttctaaggagtattgacaagcccttagctagatgacaatctcattgagaagcagaaaattcatgctggagagaaactagtgaaggtagcaatacttcattgaatattagaaaatttttctagagagaaagcattgaatatactgagtatgataacatttcctctcaaaccttatcccttactctgcatttgggagatcatacacagagaagccttataaatgtaagagatgtggaaatatcttcagccaaaagtaaatcctcactcatcaagaaatttttactggagagaaaccttgtgaatgtgggaaagcttccattcagatgtcacacctcagccagcagagaatttacagtggggaaaacccctttgcctgtaaggtatgtggaaaagtcttcagccacaaatcaaacctcactgagcatgagcattttcacacgagagagaaaccttttgaatgtaacgagtgtggaaaagcctttagccaaaagcagtatgtcattaaacatcagaacacccatactggcgagaagcttttcgaatgtaatgaatgtggaaaatcatttagccagaaggaaaacctccttacgcaccagaaaattcacactggagaaaaaccttttgagtgtaaagattgcgggaaagctttcattcagaagtcaaacctcatcagacaccagagaactcacacaggagagaagccctttgtatgtaaggagtgtggaaaaaccttcagtggcaaatccaaccttactgagcatgagaaaatccatattggagagaagccttttaaatgtagtgaatgtggaacagcctttggccagaagaagtacctcataaaacatcagaacattcacactggagagaaaccctatgaatgtaacgaatgtggaaaagccttctctcagcgaacatcacttattgtacatgtgaggattcattcaggtgataaaccttacgaatgcaatgtttgtggaaaagccttctctcagagctcatctctcactgtgcatgtgagaagccatacaggggagaagccctatggttgtaatgaatgtgggaaagctttctctcagttctcaacccttgctctgcatttgagaatacacacaggtaagaagccttatcagtgcagtgaatgtgggaaagctttcagccagaagtcacaccacattagacaccagaaaattcatactcactaaaaaccccatgaaagccttgaaagtgggaaagctttcattagaaatttgcacctcatcatgccccagaaataatccttctgaagcaaagcaccacgaatgaggttaactttaacaagtactaaaaacttaagggacaccagaaaatttgtactgaagagaaagacatgcatatgattaaaaccctgtgtccaacagagaaacctgcagcagagataatggtgaaagtttaggcacattttcactaaaagtgggaacagaaaatggaggcctgttttttattgctaccaccatagatctggagatcttcgccagtaacaagaaaaattaagttgtaaatattggaaaggaacagacaaaaatagatgacatggtcatctacaactaatattaagactcctgtggtattgattgagcagagcagaagagatttcaaaaaaagacctatgcatttattagaatttggaatatgatacaagtggcatcaggaaatgaggaaataatggaactattttttttaagtggaggtagtttgttctccaagggggaaaaatagaccatgaactatacacaaaagtgaatccagagattaaaaacagaaatatggaaaagctatgtactaaaatgcatatgaccttgggaatagggaaacattccttggaacaatttgagaaatacttagcggttctacttatgagtatgaatgctcaggaaatacgcactaggatatttactgtggcttgatttgtagtagccaaaaattagaaacaactgagaaagcccatcacgaacaatatgggaaattcttatgtaatactatatatctgtaaaatgcaacaaatgaaatccacatgtattaacagaaagatcccagaattgttgaggggggatcaagttgcagaatgatacagatagtacaatgacttttttgtaaatttgaattaaaagtttcctcataaaactcagtactatctattggtaatggatgcatatatgtatgtacatgtttttgaaacggattggaaggatacagaccaaactcttgatagtggtcacctgtgaagagtggagaagggaaaataatgagtgtgggaggtgggatgggtattggttaaaggggacttcagctttttatataaacatccacttctctttcaaaagacttcaagtaaatataagaagatactgattgattctggattgtggtatagggatatcttgtcttattttttgtacttttctgtatttttaaaatttctcaaaataggaatgggagtgaggatgggaatgctgtatctgtggaagtcatgttatactggattcatttccaattaaatactaaacattttatagaaaatatttctaaaattttatcacggatgaatggatggacttgctctctatgtaatatgaaattaatctattttattaaaatttaaaaggacagcacaatccaaatctgttttaattattttaacatggcatacacactatatcggggtccccagctccccccagctgcatggcaggaggtgagtggcgggtgagcgagcattgccacctgagctccacctcctgccagatcagcggtggcattagttctcataggagcgcgaaccctattgggaactgtgcatgtgaggaatccaggttgtgcgcttcttatgagaatgtaacgcctgatgatctgaggtggaacagtttcatcctgaaaacatcccatccccattcttctacccccacaaaccgtccgtggaaaaattgtcttccatgaaacaggtccctggtaccaaaaaggttggggaccgctgcactatatgatctctgtcttcgtatttctaacattttgcagaatgagcttagaaaactttaactttttctttgttcatacatgcacaggcttcatataattggtctttttcagttaggctgattttggaatgtcagttttcctctcctgcatatttccatgggaaacgtgtgcattaaatattaaatttttgataatatctttttttttttttttcccatcttgctctgttgcccaggccagaataccatggcaggatcttggctcactgcaatctcctctgcttactgggctcaagcagtcctccgacctcagcctcccaagtagctgggactacaggcacgcaccactatgctgtgccaattaaaaaaaaaaaattgtagcgatggggtctccgtatattgcccagattagtcccaaactcctggggtgaagtgattctccatggcctgttcaagtgctgccattacattacaggtatgagtcaccatgcccagctaattttatttttaaaaagagaaaacaacttcccataacttccacagttcagtgcattagataccaacacctgcgtgtctgtcttaacctgcgagctctgtcactcctcccactgctgttacagagagagaatgggacgggtatgagaaaaatggctcagaccctagacagagttctattttgtaaaccagcccttcatgaaaatttttttattctttgatcacattataatataaagaatattattaaaggttttcttgaataatggtgaatgtcaataatatacagcatttgagcttgattttgaaaccttaaaaaactcattaaatggcactgcatcactgtatcttttagcctttttggaggaattagatacttaaatgtctaaatgaatctgccctttatattatgatgtaccccatctttttctctgttttccctgtttgcacatatatttcacatttaaaggtgttgtctttatgatacagttggccctctgtatccatgggctctgcatccatttatcaacgaaccctggatggaaagtgtttaaaatatacaacaattttaaaaatacaaatgttaatatacaactatttggatagcatttacattgtattaggtattatgactaatctagagatgattctagctaggcatgtgccacacatctgtagtcccagccacttgggagggtgagctgggaggattgcttgagcccaggagtttgaggctgcagtcagccgtgattgcaccactatattgcagcctgggtgacagagaccctgtcgaaaacaaacaaaaccaggaggaaaaacacagggatggagacagatcagtgggaagagaattgagagtccacaaatgctatgggttgaatgtcccacccaaaactcaatgttgaaatttaattgccatggtaatggcatgaaaggttgagacccttaaaatggccatgaaggggctggtcgtggtggctcacacctgtaatctcagcactctgggaggccgaggcgggtggatcacctgaggtcacgagttcaataccagcctggccaacatggcaaaaccccgtctctactaaaattacaaaaattagccgggtgtagtggcacacacctgtaatcccagctacttgggaggctgaggcaggagaattgctccaacccaggaggcagaggtttgcagtgagccaggatcgtgctactgcactccagcctgggagacagaatgagactctatctcaaaaaaaaaaaaaaagatgtccatgaagtctccactttcatgagtaggattggtgtcatgataaaagggcaagttttgtccccacttgctgtctcttgtctttcctccatgggatgacataacaagaaggcccttgccagatgtcagtctctcagttgtggacttcccagcctccagaactgtgtaccaatatgttcttgttccttatacgttaaccagactcaggtattctgttataccaacacaaatcaattgatacactgtgggcaactgattttcaactagaatgccaaac[136 bp omitted]tggcaaaaccccgcctctactaaaaatacaaaaattagccagatgtggtagcgggggccagtaatcccagctacttgggaggttaaggcaggagaatcgcttgaacccaggaggcagaggttgcagtgagccgagatcgtgccgttgaactccggcctgggtgacaagagcaagactctgtattaaaaaaaaaaaaaaaaaaagtgttggggccgtgcgcagtggctcacgcctgtaatcccagcactttgtgaagcggaggcgggtggatcacctgaggtcaggagttcaagatcagcctggccaacatggtgaaaccctgtctactaaaaatacaaaaaattagctgggcgtggtagtggacacctatcatcccagtactttgggaggctgagctaggagaatcgcttgaacccaggaggtggaggttgcagtgagctgagattgtgccactgcactccagcctggcaagaagagtgtcaaaaaaaaaaaaaaaaaaaaaagctgggacaattgaggtacaaagatgaatttggactcttgcttcacaccgtatacaaaacttaactcaaaagtgtccaaagacctaaacataagagataaactcttggaggaaaacataggaacataggagtaaatcttcatgaccttagatttggcaacgattttgtaaatataataccaaatataataccaaagtataagcaggaacaacaaaagtagataaattggattttgtaaacatttaaaactttgtgtatcagacactatcaagaaactgaagttca[138 bp omitted]catggtgaaaccttgtctctactaaacataaaaattagccagatgtgatggtgcatgcctgtagtctcagctacttgggaggctgagacaagagaatgactgaacacgggaggtggaggttgcagtgaggcgagatcaagctattgaactccagcctgggtggcagagcgagactccatttcaaaaaaaataaagaacaacctattaaaaatgggcaaatttctgggcacggtggctcacacctgtaatcccatcactttagagggctgaggtgggtggatcacgagatcaagagctcgagaccagcctggccaacatggtgaaacccgtctctactaagaatacaaaaattaccaggcatggtggcacgtgcctctcatcccagctacttgggaggctgaggcaggagaatcacttgaacctgggaggcggaggttgcagtgagccaagatcatgccactgcaccccagcctgggtgatagagcaagactctgtctcgaaaaaataaataaaatgaaaattaaaatggacaaataaatagaatcattttttccaaaaaagatatacaggtgtccagcaagcacatgaaaagatgttcataaatcattgtgtaagtccagtatctgtttcttcttgacatggtcatctgctgattttcttttcccctgataattcatcacattttcccagttctttgtatttcaaataattttagattgcacccagtgcattttaagtattattttctaagactgtgttctgttcagattatctgagagtaaatgttgggtttttggttttggtctttttgtttgtttgtttttgaggcagaatttcgctcttgtcccccaggctggaggataatggggtgatctcagctcactgcaacctgtgcctcccgggttgaagtgactctcctgcctcagcctcttgagtagctgggatgacaggcgccctccaccacgcccggctaatttttgtatttttagtagagatggagttttgtcctgttggccaggctggtctcaaattcctgacttcaggtgatccacccacctcggccttccaaagtgtggggattacaagcgtgagccactgtgccaggcccaaactggataatttcaaatcctcagggaaggcagacttccattactggccaagatgggataagcacatttcagcatctctctcactgatttctatttaacaccccagagtgaatacaaaaagaaaccacctgaagattcagaaatacaagtaatagcaggcagatgtgaagggagttaaaaacgagaagaatggacacgatgaccatatgtttgctgggggattttcctcctttatcttttggctttggaaggagggaagtctcagagctgtgtgatgggttcagggagcataaattatgagagaaatgccttccttccagccagaggagtccaaaagaggacctggtgtgacagagtgagagaggggttcttttttttaattgagacagggtcttgctatgtcacccaggctgggggtgggggtggcacgatcttggctcagtgcagccttgaccccttgggctcaagtgattctcccacctcagcctcctgagtagctgggactagaggcatgagccaccacacccagctactttttaaaattttgtagagacaggggtctcactctgttgcccaggctgatttcaaactcctgaactccaggaatccaccctccttggcctcccaaagtgctgggattacaggtgtgaaccaccacacccagccttcccttttttctgtttttcttcttttctctactggccttgcaccaagaacagccccagtcattaggctgctctgccactgccgtagctgtcaaccaaaccaagaaaaaagacccatgggatcccatgtctgtgtgtctgagtggctgggggcagggggtgtcctctctttctctctctctattcttgccacctcaccacaaagtggagctaggtctggtcttgtgaaaacgtgcctgttgggggcgctgggagggcagctgaaactctgacagaaggccggatgcggtggctcacgcctgtaatcccgggaggccgaggcgagcgaatcagttgtcagaagttcaagaccagtgtggtcaaaatggtgaaacccttctctactaaaaatacaaaaattatctgggcgtggtggtgggtacctgtcatcccagctactcaggagactgaagtaggagaattgcttgaacctggaaggtggaggttgcagtgagcaagatcgtgcactccgacctgggcaacagagcaagaccctaaagaaaaagtttattaatttttttttaaaaaggaggctgggcacgctggctcacgcctgtaatttcagcactttgggaggccgaggccggtggatcacgaggccaagagatcgagaccatcctggcaaacatggtgaaaccccgtctctactaaaaatacaaaaattagccgggtgtggtggcatgcgcctgtaatcccagctactcgagaggctgaggcaggagaatcgcttgaacccgggaggtggaggttgcagtgagccgagatcgtgccactgccctccagcctggcgacagagcaagactacgtcttaaaaaaaaaaaaaaaaaaggaattgtcgaattctacgccttagattagaacgtgtctttttcatccactgtggttggtactcgataggcttgtatcttgttgacggtcagttttgggaccttttctcgtattatgtggtaattttcattgttgtgttttgttttcttgaatccctactgttcagtggctaggctagaaactgttggaaactcttaatttatcatgtgacgttttatttcttttgagtttagggatccacagcctgagacccggcgagcctcgctgcccttgcgagagccatggattcgcatttgcgcagagtcggggtctgttgctacgggtcccctgggctcctttgaatcgctttggcagctccctcggtttagagctacagggttttctccctcccctgagactctaacgcgtgcaccaactcgcgcctagagggcgtgtatgaccccagctcagttctaagccgaggggctgctgccggacattctagggtctgatctggcgggctcgaagggaggacagtcactgcgacccggaaagctccgcgcttacgacgcccacccagaaaatccggatcacatttcccgtggtccaccgcgcatctaggaggttacctgcgtccaggcggtgacttgcgagggaccacctttcccagggtccacggcgcatttaggtggtggcttgctctggactacatttcccagggtccaccgcggatctaggaggaggcttgagatgcagcctcccagcttcgaggctaccacctgcccgaattggtgctttggcagagtctctggtgcccgggtgaatgggttcagggtctcttaaggaccctccgttgacgatgcctcgagctatgacccaccctggctccgtccacggttgtcggggtcccgggctgcttttcttggagggctcggtgccggaggctactcttgagtcccggttccttcgcccagctgcgggcctcgggctactggatccgctgtctcggtttgggtgcggggccttggctcaggcggaacccgaccgggatcgccccgcgagatgcagtcgttgagggagtcaggagcccgggtctgggcggggaccccaaggctgctggagccggagctggcgcgggggagacgtgtgtgtgcgcgcgtgtgtctctctgtgcgcgcgtcagtgtgtgcacgcgtgtgtctgtgtttgcatctctgtgtgtgcacacgtgtgcctgtgtgtgcgtctctgcacgtgtctgtttgcctgtggtgcacacgcgtgtctgtgtgcgtctctgcgcgtgcctgtttgcctgtgtgcacacgtgtgtctgtgtgcgtctctgtgcgcacgtgtctgcgtgcgcgtgtctctgcacaagtgggtgtgcgcgcacgtctccgtgtgtgcgtgtgtgtgtgtgtggcgctagccctagccagctgtttgacgtgcatgattgtgacagcagcatgcatgattgtgacagcagcattaggtgtgtggccacttgtaaccacgtgaatggcttttcttgactgtgtgtaactcttgcttatgttattgactgtatgtgaatagttacagagggagtgtctgtattgccgaagtagtgagagcatgatggtgtgtcatgagcagttttagtgaaaggtaggaagcaaccagggtgtttttctttctacatttacacacaccactcaccaatgtgtggagtttttttctcccacactaaacagttcttcagcggacaccaactgggtgtgctacagttcagtgcaattccaactgtacctggagatagcagcagaacccatcggttaagggcttagtcccaaaatactgcccccgcttcagatgccaattgcaggtcccaggatgtgacctgtgcttctgacctactggctataaatcaaggttgccatgacccctcaagtttgagtattttgctagagtggttcacagaactctgagaaacactttatttatgtttacccatttattataaaggatattgacaaggatacagattaacagccagaaggaagagatgcatagggcaagatatgggggaggggtgcagagcttccatgccgtctctggctgcaccaccctccaggaacctttacgtgttcaataatccaggagccctccaaaccccttagtttagcagtttagtttagtttagtagtttagttttagtttagtttagtttagtttagtttagtagtttagttttagtttagtttagtttagtttagtttatcccagtgtaggggtgggttgcccctacacacctgtgggtgtttctcaaagagggggatgtgtcagggtcacaagacaattgtggggagagggtcagcagacaaacacgtgaacaaaggtctttgcatcatagacaatgtaaaggattaagtgctgtgcttttagatatgcatacacataaacatctcaatgctttacaaagcagtattgctgcccgcaggtcccacctccagccctaaggcggtttttccctatctcagtagatggagcatacaatcgggttttataccgagacattccattgcccagggacgggcaggagacagatgccttcctcttgtctcaactgcaagaggcattccttcctcttttactaatcctcctcagcacagaccctttacgggtgtcgggctgggggacggtcaggtctttcccttcccacgaggccatatttcagactatcacatggggagaaaccttggacaatacctggctttcctaggcagaggtccctgcggccttccacagtttttgtgtccctgggtacttgagattagggagtggtgatgactcttaaggagcatgctgccttcaagcatctgtttaacaaagcacatcttgcaccgcccttaatccatttaactctgagttgacacagcacatgtttcagagagcacagggttgggggtaaggtcacagaatctcaaggcagaagaatttttcttagtacataacaaaatggagtctcctatgtctacttctttctacacagacacagtaacaatctgatctctcttgcttttccccacacccagctacttgggaggctgaggcaggagaatctcttgaacctaggaggcagaggttgcagtgagccgagatcttcccactgcactttagcctgggtaacagggcgatgctcagtctgaaaaaaaaagataaagcaaagaaaaaagaaatttacagtttatgagcgaaaacaacatggctataatttccgcaatgtagacatttccagggtgtaataagatagttggttgaaagctggggataaggatatagaagatgttttgtgtctaccttgaggaggaagaggtgggacatgactgattagggataaaggagagtagagtgcagagtcttgggagacaggacctggctgtccaggcaagtgtggtgtgggcgatgttaatgactttcatgggatggacagatgccaaattaaagcagcatatgctaaagggttgttttttttttttgaataatgagggcaaacagtgacattttgcaaagataaaattctcccttttcctagacgaggtctctcctactctcacaccactcaacactcaataaagaacatttctgacaccagatgtgtgggttttttctccacacaccaagcagttccccattagacaccaactgtaggactacagttcagttcagttctgacaccacctacctggagatagcgtcagatcccacaggctaagggaccagtcccacaagatccttccacttcagatgtccatctcaagagccaggtggtgacctgtacttctgaccagctataaatttggggtttccacatcctctcctcaggtgtgattaatcttctaggatggctcacagatctcagggaaaccatttacttaacattagtccatttagtataaaggatattacagctgggcatggtgttgcccgtctgtaatcccagcactttcggaggctgaggtgggcagatcacttgagcccaggagtttgagaccagcctcggcaacatagcaaaaccctgtctttattaaaatacaaaacttagcttggtgtggtggtgcacgcctgtagtcctagtactagggagaccaaggtgggaggattgagcctaggaggttgaggttgtggtcagcccagatctcaccattgcactccagcctgggcaacagagcgagaccctgtctcaaa[136 bp omitted]aaaaatgcaaaagttagccgggcatggtggtgggcgcctgtattcccaggtactcaggaggctgaggcaggagaatcgcttgaacccgggaggcagaggttgcagtgagccgagatcgtgccactgcactccaacccagacaacagagagagagtgtgtctcaaaaaataaaaaaatgaaaataaataaaaaggatattacaaaggttttcgatgaagaggtacctagggcaacatatgtgggaagtggcattgggcttcaatgccctcaccccagcacatcatcctccaggaatccccacgtgttcagcaatctggaagctctctgaacccaatccttttgggttttcatggaggcttcattacataggcatgattgataacatcattggccattgtcagtcaactcaaccttcagctgctgtcccctccccagaggtcaaggggtggggctgaaagttccaaccctcatatcacattctgaggccatccaggagcccaccaagaagtcacctcattagaacatactatgctcctatcagccaggaaatcccaagggatttgagaactctgtgtcaggaactagggtcaaagaccagatattagaacaaatgatcctcctagtacccaagggttttaaggagctctagaccaggagctagggacagagaccaatatatgtgtatttctttttattttatattcccagctccccaaggttatccattttaaaagtctagtaagtttcctttacctctctccttgctcaaacatgcacatacatatattgagtgacttttattcccttttgcctttactagaattatatgtaatttttttttttagcttgtgtttctagggaagaccttatggatgtccttccaaattagtgcttactgatttgctgatttgagtagtacttggaaggacgtaatttttttttaattcaagctttttattatggatactttcaacattatatatgcagagagcctagtacagtgaatccacctttgacaattaacacatggcgagttttgcttcatctctatttccacttgattattttaaagaaaattccaggcatttcatctataaatatttcagtatgaaatatagttcttttaagaacttttcttaaaagacaattttcgtatcatcatcttaagaaaatgaacaattcctggccaggtgccatggctcatgcctgtaattccagcactttgggaggccaaagcaggaggatcacttgagtccaagagttagagaccagcatgagcaacatggcaaaacctcgtctctacaaaaaaatacaaaaaattagcctggcatggtggtgcgcacctgtagtcccagctacttgggaggctgaggtgagagcatcacctgaacctgggaatttgaggctgcagtgagccatgatttcaccactacatttcagcctgggtgacagagcaagatccctgtctcaaaaaaaaaaaaaaaaaaaaagaaaaagaaaaaagaaaaaaaagaaaaaagaccaatttcttaaaattacataatcagttgcagttgatttgttcaaattagaattagtttagagtttaaacaagatctacacgttgagcttagaggataaagctcttatatatctttttttttttttttttttttttttttttttgagacagagtctctctctgttgcccaggctggagtgcaatgacacgatctgggctcattgcaaccttcacctcccggattcaagcaattcttccccctcagcctcccgagtagctgggattacaggtgtatgccaccaggcctgactaatttttgtatttttgtattttttttgtttttgtttttgagacagagtcttgttctgtcacccaggctggagtgcagtggcgcgatatcggctcactgcaacctctttctcctgggtttaagcgattctcttgtctcggcctttcaagtagctgggactacaggcatgcactatcatgcccagctattttttgtatattcagtagaggcagggtttcaccttgttagccaggctggtctcaactcctgacctcaagtgatttgccaatcttggcctctcaaagttttgtatttttgaagagacggggtttcatcatgttggccaggctggtcttgaacttctgaccacagatgatctgtctgcctcagcctccaaagtgttgggattacgggcatgagccaccacacccagctgtctcttatatatcttttaatctattgacttcccttttttcttgctatttatgttttggagaaatcaaacactagatcatatagagtttccacatactgcctttgagtacacccccatggtactgattaacaaattagatgctctgtattttctctaaaatatctggtaattaactagagcagtggttctcaaccagttgtgttttttgtttctttgtttgcttgtttgttttctctagaagacatttggcaatgtttggagatatttttggttgtcacaactggaaggaaggatggtattgctggcacctattggctagaggccagggtgctgctaaacatcctatactgtacaggacagcctcctcccatcccaaagaattatctggtccaaagtgaaaatagtgtcagagttgagaaactgtgctctagagacttgatcaaattcaagttcagttattttggcaagatctgcttgtcactattttgtgatcagatttgttagtgggcttaagtgtcatcaatgtgatttatccattgtaaagtgattgccttttgcataatgtcatgcattcactgatgatcaatgcctagattcattatgttgttaggagttgcaaactgatcactttcttattgtgtctctctttcagccattactggaatccttttatttccattactggaatttccattactagaatccttttataaaaataaaatctgcccacatcaacaatctgattactcagagggatagcatgtgtaggaaagggaggataaatgcttgattctttccattcatattcattagttttcagaattacgaatttcagaatactgcattggtttcctagtttccaaaggtgattgcagcagattgtattttccaaagatggttgcaataataggcttgttccatatgttattctagaatcttgccattcccactttaagaggtggagtctaactcctctgcctttgaatctggattggtttattgtttataaccaatgctgtgtgactcccagggctcagtttaagaggcactgtggccttcacctcattagctgaaactccagtgtttgaaatcttgagccattatctaagaaggtccaagtgctctgagccgccatgctatgaggaagccaagtcacatggggaggctactagtccaagtctttgagtcctcccaccccaggtaccagacatgtgtgcaaagcaggcttcataggtttgcagccctcaggtatcaggttattcccagcctttgaatcctcctggttgaggccacagacatcaggagcaggggcaaactatctgctctgtgagctgtctgaattcctaacccacagaatcagtgagcacagtaaaatcattgtattatactactgagtttggagtggtgtattatacagcatcagtaactggtgaacaatgactgatatacccacacttgtttatgtcatattacacacacacacacacacacacacacacacttttttttctttagaggtggggtcttgctgtgttgtgcaggctggtcttgaactcctgaactcaagtgatcctcctatctcagcctcccaaagtgctgggattacagatgtgagccactgca[135 bp omitted]ggtgaaacctcatctctactaaaaatacaaaaattagctgggtgtggtggtacacgcctgtattcccagctacttgggaggctgagtcaggagaatcgcttgaacgcaagagtcggaggttgcagtgagctgatatggcagcattgcactccagcctggcaacagaatgagactctgtctcaaaataataataataataatatgagcaagaacaactgcacctaacaaataaaaactgatggtaatacataaggttacacaaatattcaaagacatatcatgattcgaaaaccacattaactgttctcttggctatcccataccaagtggagccaaaggctctgcacaggtttccaaacccgaatcatagccatgatagcaactgtggtcctctccctcctggttacctgctcacctgaagcaggtaagagcctgcttggcttcctagagaggcacttctgaggcaggagaataggaaattagtataaccaagccaggcgcagtggctcacgcctgtaatcccaacactttcagagtccgaggcaggcagatcatgaggtcaggagttccagactatcctggctaacagggtaaaaccccgtctcaactaaaaatacaaaaaataagccaggcatggtggcaggcgcctgtagtcccagctactcaggaggctgaggcaggagaatggcgtgaacccaggaggtggagcttgcagtgagctgagattccgccactgcactccagcctgggcgacagagcgagactccgtctcaaaacaaaaaggaaaagaaaattagcataaccaagggttaaggtggaagcaaaagaacagcaggtgcagcaagttctaggccaggttaagcagcacacaggccacatcctcactcctgtgatgacaacacagaagtctccagttcagcctctggccacgggccaatccttcatagggtgtaaccaattgaagacctcgaaaaggcacttatgggtgttatcaaattctttagcttaataactctaaagaacattgtaatctgggctcctgagccgcttgctctagcccactctggctctgtagagtggacttttgcttcaataaatctgcagtttcgttgcttctttcttctttcgtggctttgatcttttgttgcttcgtgtagtttgtttaattctttcttcagtgagccagaaacatggacaacttgcagtcaagaccttccatccagtaaaacttctacattctagaagtctcagtattgccaagagatgtcaaggcatcaaggggtcaaggttaaggcctaagattaaggctcaatgttatacgtgccctgacactgggggaaaacaaggagggctgaatggattaactgcaaattccctgccccaatgtactcctttgaataaggtgccctagcccaagcacttccttcagaggccaggcacagtacctgcttactgcgtagtagtgggcgtcaggttccagccagcctgcagaattattcaaacaggccattcacaccctccttcaagaaccaggggttacctcccatactcttggtactacaaagcctcctggaatagcctccacctgattactgtgttcctgagtgcaacacactgtaccccacatggtgtgctgggctctccttccctggggcgaaagtatgggtaattagcaaaccaatgttcatctcatctatccagtgttagctaccatgtgcttagcaataatctgcacttcctttctaattcttgagagacatccgggtcctctgctcctgggtggaggattttagaaaaaaggtcactcagaatgggcaggtgacttgaacgcctgcgggtccgacacagcaccaaacctcgccaaggccttcagaaaccaaaagtgcaactgccaggaaaatgactgcccgttccagtcacaggaccggctacacgacccaggcagagaccgagaaagaggctcaccaaaaaggccaacatgcaagaaactgccctccagagaacaggggacgtttgtccaaagacatacatgcacactcccattcacacacacagccccagcaatttttttcaggggctgcagcctgatccagagcagagcgcagtcagccttggcaaggcgcatacacaaatcgcgagcggatgctcacgtcacagagaccgccaccgttgcctggagatgagttcttcactctctgcgaaggaggagccttctgtagcagcgcatcggctcggggctaagtctagtcctcactggggcgtcgacgggatggtatccggaggccaggattcgcggaggttcgaccaggaggaagaaacctcaggcggagcgtctgggaagcagcgcagtatcccaggctcaggcctgcgtggacggtgtgccggtgagtctccccaaaagtcgtgcccttgcgatctccaggacaggtctgcttgtatgcccaagggctgctctctcaccccagggtcgttgtcgctcagagcagaacccagaggcttcaggggctgcctggagatgaatgttactgtgccactgcagtatgtctgggttgtgtctctttctcttatttctgttttcattctccgtctatcactctctaccagtttccgtccgtgtgtgcgcgggtgcgtgcgtgtgttgggatgcatgggcaatgaagggcggtttcttgtaccttggcctttcttctggtgagtctctcctcgcatctctgtctgggtcatgtggccgggtgtcattcgttttccaggcggttacagtttgggttcgtgaccggtgggcaacgtggggagctacatgagacacggcggggattaaatcagctcccaatcatgagcggcctcattgctagaatcaagacaactacaccccagcaaaggaaaaaattctcacaaaagctcatcataaacctgcttatgcaggtcgaggtgcccatcgacctcactcctctcaatcctctcgcgtgtgccctcactgagaaatctagccacagctcgatacagggacggaaaaggaagccggcaacgggatggggcaaacatctctgtggctccaacgctggccttcgtggccaagtcacccgtttggcactcctccccggatggccgtggtggtggcattgccgccaatcctgcctgggctctggcctctgctctgtcctccctcttgctctgtctgccctgtttctgagaggcctaggggcttgttagtctggctcaatgtcttcaacccagaagacttcccagtccatccgggagaaagttcctgggggtcggtgtcatgattgtttccttctccaaacctctttcagcatgattgggcaggtgtggtgatcctggagctctgggctttcatagctgtctgggacagggaagctttctgggtctctgtggccccgtggtcggtccaggaagagcgggaggcaacccgaccgttcctgacatttgccttctaggaaaggcggtgtggcatgccacctgcacttcctctctgattcttgagggccatcgggttcctctgctcctggggaaagagacttctagcactgaatcttctggctgccacggatgtcagggagccaaagggactgggttttgctgggtgcaggggaggtcgcgtcgggggtacctacccggtcgcggggtgggggtggggtgtagtttgtggaaagctctcggcccctctggcaggcatctctgaatgtggcttggattcgggcgcaggccctgtctcgcaggttttcaggtgcgcttggcttttcctcagctttgttgcggaggtctcccgtggcccccgggcgcacggctggacaccactgtccgtctcgccatcgccccctacggcctcaaagacacctgctcactccatctgcttttggggacgtcggtgccacgtgtggtcacactggctccatctcggactcgcctatgtctgtctttgcacgtgtcgcgggaagcagtgtcggtatgccggagcccccgggccttggagatgaaggcaggccactgctccacccaggaaggagggaggcagtgggctcgtgtgtcagttcattttccgccgacagcacgccttggggctctggggatctttctgtgccccagcgagacccttcccgcctcactgcattgcaaccccattctcgatcacccggtgggatccatcctcggagccgaagaggagtctgcacagcccagccggcaccctgaagctcctcctccactgggaacgaagcagaagaccgatcaaggaggtcctgacggcaggacccctacgggtccgaccctgggtctcccgcaggcccctctggcaatcctcttcccacccgccgcctcgggctgcgctgccttcgccgccgcaagcgccgccaccgccgccccggtccccgcaacctgccgcgtcgccgccattttttaaagggtccgcagcctgactctctggggcgaggggcgagtcggcctctccagtgcgcatgcgcgaggccggagccgccgctttggtcacagggatcaccaccgttgccccggggtgagtccctgagactgggccaagtaggaaccctctgtgaccgagcgtcagagtcggggctgagatcagtcctggccagggcattaacaggatggtctcggaggccgggattcgcggagggtcgaccagcagggagaagcctcaggaggaagaaacctcagacggatcgccggggaggcagcgcgggatcccagcctcaggtgtgtgcggacggtgtgcccgtgagtctccccaaaagtggtgcccttgtgatgtcgaggacaggtctgcccgtgtgcccgtgggctgctctctcaccggtgggtcgtagtcgcggagagcagaacccagcagcttcaggggctgcctggggctgggtgttacctgctgtatgtgtgtctgcgtttggggtgtgtgtgtgtgtgtctgtgtgtgtctgtgtgcccacttatgtctctctctgatatctctctctctcccttctcgctctttccatcgctctcttttactatctctgtccatctgtgcctgcgtgtttgctgggacacaggtgccctttgcaccagagggtggtttctcccacgtcagcctttcctgtggtcagcctctccccgggtctctacctgggttgtgtggcccgttggcagacgttttcccggcggttccagtttgggtttgtgaaggcctgggcaacatgggcacctgcgtcggacccgcagggattttcatcccctccctatcctgagcagcctctttgctgggatcaagacgaccacaccccagccaaggacaaagtcctcagaggggctcattgtccacccgcaggagggtgcccacagatcttgaagaagacgcttctcactcctcttgccctttgccctccttgagaaatgtagccacagctcgacacagggacggagaaggaagccggcaacgggatggggcaagcatctctgtggctcaaacgctggccatcttggccaagtcacccgtttggcactcctccccagatggccgtggtggtggcattgccgccaatcctgctggtctctggcctctgctctgtcctccctcttgctctgcctgccctgtttctgagaagcctaggggcttcttagtctggctcaatgtcttcaacccagaactcttcccagtccatccgggagaaagttcctgggggtcggtgtcatgactgtttccttccccaaacctctttcagcataattgggcaggtgtggtgatcctggagctctgggcttccatagctgtctgggacagggaagctttctgggtctctgttgccccgtggtcggtccaggaagagcgggaggcaacccgaccgttcctgacatttgccttctaggaaaggcggtgtggcatgccacctgcacttcctctctgattcttgagggccatcgggttcctctgctcctggggaaagaggcttctagcactgaatcttctggctgccacggatgtcaggaagccaaagggactgggttttgctgggtgcaagggtggtggggtcgggggtacctacccggtggcggggttggggtggggtgtagttcgtggaaacctctcagcccctctggcaggcatccctgaatgtggcttggattcctgcacaggccctgtctcgcaggttttcaggtgtgcttggcttttcctcagctttgtggtggaggtctccagtggccccccgggcgcacggctggacatcactgtccgtctcaccctcaccccctacggcctcaaagacacccgctcactccatctgctcttgggggacgtcggtgcgcgtccgtgtgaagagaccaccaaacaggctttgtgtgagcaacatggctgtttatttcacctcggtgcacgccggctgagtccgaaaagagagtcaatgaagggagatggattatcattagttcttgtaggttttgggttaggcggtgaagttaagagccatgttttgcgggcaggggtggatctcacaaagtatattctcaagggtgggaagaatttcaaagagccttcttaagggtgggggatattacggagtacattgatcagttagggtggggcaggaacaaatcacaatgatggaatgtaatcacttaaagctattttgacttcttttgtggatcttcagttacttcaggccatctgggtgtatacgtgcaagtcacaggagatgcgatggcttggcttgggctcagaggctggacattcctgccttcttatattaataagaaaaataaaatagtgttgaagtattggggcggtgaaaatttttggggggtggtatgaagagagaatgggcgatgtttctcagggctgcttcaagcgggattggggtggcgtgggaagctagagtgggagagattaagctgaagggagatcttgtggaaaggggtgatattgtggggatgttagaagaaacatttgtcatatagaattattggtgatgacctgcatacggttttggatggattgagaaactaaatggaaaaagagaaggagaaaaacaggtataaaaggtctaagaattgggaggacctaggacatctgattagagagtgcctaaggagattcagcatagtcctgccagcaaagattatttatttacttcaagagtttagagtggcagtttggggatggcaccaggagatatcagctgtgatggcttggagaaacagtgtaaactggcagtgtaaacaagaacagggcatgtatgagtagttgagaacggtgaataggagtatgactagagagaagatagtagggatggcaagtttttttggggcacagtctaagttggtctggtgtcaaatgagactggggcctaataaaaaggagcgtctatacaggagcttaaatgcgctgcaccttgcagcattctgacgacaggtctgacttctgagaagggaaagtggtaaaagtactttccagtcctttttaagttggtggctgagcttggtgaggtgtgtttttaaaagacctttagtcagttctacttttcttgaagacagaggaccataagggatataaaagttttactgaatactaagagcctgaaaaactgcttggctgatttgactactaaaggctggtctgttaccagactgtattgaggtgggaaggctaaactgaggaattatgtctgacagaagggaagaaatgactgtggtggccttctcagaccctgtaggaaaggcctctacttatctagtgaaagtgtctacttagactaagaggtattttagttatctgacttggggcatgttgagtaaagctaatttgccagtcctgggtgggggcaaatcttcaagcttgatgtgtagggaaaggagggggcctgaataattcctgaggagtagtagaatagcagatggaacactgagaagttatttccttggggatagatttccacaatggaaaggaaacgagaggttctaagaggagggatagtggcttgtactatagcatagcctgcctttgctggtgtgtggcgattaggcctggtggaactgccatcaataaatcaagtgtgatcagggtcaggaacaggaaagaaggaaatatggggaaatgggatgaatgtcaggtggatgagagagatagtcatgggggtcaggtgtggtatcaggaataatgtgggaggctggattgaagtctgtgccaggaacaatggtaattgtgggacttaacaaagagtgagtacagctgaaggagtcagggagcagaaagtatatgcatcaggtatgaggaagaaaatagattttggaagttatgagaaatgtagagagtgagttgagcatagtttgtgattttgagggcctctaaaagtattaaagcagtggcagccgctgcacacagacatgagggctaggctaaaacagtaaggtcaagttgtttggacagaaaggctacagggtgcagtcctggctcttgtgtaagaattctgacacacaaaccatgcctaggaaggaaaggagttgttgttttgtaagggattgaggtttggggagattaactggacacgatcagcagagagagcacgtgtgtttttccgagaattatgctgagataggtaacagatgaggatgaaatttgggcttgactgaagtaatggggtctgtctgtgaagccttgcggcagtacagcccaggtaatttgctgagcctgatgggtgtcagggtaagtccaagtgaaagggaagagaggctgggatgacgggtgcaaaggaataggaaagaaagcatgtttgagatccagaacagaataatgggtagcagagggaggtactgaggacaggagagtacatgggtttggcaccatggggtggataggcaaaacaatttggttgataaggcgcagattctggactaacttgtaagccttgtctggttttaggacaggtaaaatgggggaattgtaaggagagtttataggctttaaaaggccatgctgtagcaggtgagtgataacaggctttaatcctttcaaagcatgctgtgggatgggatcttgacattgagtggggtaaaagggtgattaggttttaatgagatggtaaggggtgcatgatcggtcaccaaggagggagtaggggtatcttatacttgtgggttaaggtggggggatacaagaggaggatgcaaaggaggctttggattgggaagaagggcggcaatgagatgcagctgtagtccaggaatagtcagggaagcagataattttgttaaaatatctcggcctaataagggaactgggcagagggggataactaaaaaagagtgcataaaagaatattgtctaagttggcaccagagctggggagttttaagaggtttagaagcctggctgtcaatacctacaacagttatggaggcaagggaaacaggcctttgaaaagaaagtaatgtggagtgggtagcctccgtattgattaagaaggggacggacttaccctccactgtgagagttaccaaaatctcggcgtctgtgatggtctacggggcttccgaggagatcaggcagcatcaatcttcagccgctaagccaaggagtcagtcagagagctttgggccagagttccaggggctctgggagtggctgccaggtgagttgaacagtccgatttccagtgggttcctgcacagatgggacatggcttaggaggaatcctggactgcaggcattccttggcctggtggtcagatttctggcacttatagcaagctcctgggggaggaggttctggaggaacgcctggcggctgcggttcaagcgtttggaagttcttgtgtgctggagatgtagctggggtttgtctcacagtggaggcaaggaattgcaactttttttttattattgtacaccttgaaggtgaggttaattaagtcctgttgtggggtttgagggccagattccaatttttggagttttatttaatgtcgggagcagtttgggtaataaaatgtatattgagaataagatggccttttgaccttttagggtttagggctgtaaagcgtctcagggttgctgccgaacgagccatgaactgggctgtgtttttatatttgatgaaaaagagcctaaacgcttctgatttgggataaagagaaaggagtattaaccttgactatgcctttggctccagccaccttttaaacagtaaattgctgggcaggtggagagggctagtaacagaacgaaagtgtaagctggaccaggtgtgaggagggaaggcgataaaaagattacaggatggaggagcagaggctgaggaagaattaggacctagctcggcctggcgaggaggggagaggtcagatgggtctgtagaaaaggaagattacaaagactcagcgacacttggggttgggactgaggggacaggtgggagggaaagaaagaagatttgggagcagttgcactgggcacagagactaggaagggactgatgtgtgaaagaatgcctggacatcaggcctcctcagaccatttgcccattctatgacaagaattatttagatcttgtagggtggaaagattgaaagtgccatttttgggctatttggaactactgtggagtttgtattggggtcaggcagcattgcagaagaaaataagacgcttagattttaggtcaggtgagagttgcagaggtttataagttcttaagaatacaggctaagggagaaaaaggaggaatggagggtggaaggttgcccatagtgagggaggcaagcccagagcaaagagagcatagagagagggagggaaggggttcaggggttctcaccctccagaaaagtgggaaaggggttgtagcgtggaaataagggattggggattcttgccacctagaaaagtgggacttgctgctaagggtgaaggagaaggggttgaggggtacttgcccctaccccagaaaagcagagaaggggtagagacacagaaggggttggggtacttgcccgtcccctagaaaagtgggacttgccactaagggtgaaggagaaggggttgaggggttcttgctcctgccccagaagagcagagaaggggtagagacacggagagaaggggttggggtacttgcccctcccccagaaaagcgggacttgccgctaagggtgaaggaccaaggcaggcgtccctgcatggtctgacacctttgaaacatgggtgaataatcagagaggtgggcctgcaatgattaaacaccaagggaagcctgccttcccagtccgtgaccggcgccggagttttgggtccacggataaaacgtgtctcctttgtatctaatagaaaatgaaaggaattgaaattaagagatgggagagattgaagtgtggtgccaagattgaaaggagaaagaggttggagggatagtgagagaagttggagagtaaaaagaggccgcttaccggaagtgaaattggtgagatgtttcttgggctggtgagtctgaggacctgagctcataggtggatctctctcacggagcaaagagcaggaggatgggggattgatctcctaagggaggtcccccgatccgagtcacggcaccaaatttcatgcccgtccatgtgaagagaccaccaaacaggctttgtgtgagcaacatggctgtttatttcaactgggtgcaggtgggctgagtctgaaaagagagtcagcaaagggagatggattaccattagttcttataggttttgggataggtggtgaagttgatagcaatgttttgcggacaggggtcgatctcacaaagtacattctcaagggtggggagaattacaaagaaacatcttaagggtgggggagattacaaagtacattgatcagatagggtggggaaggaacaaatcacaatggtagaatgtcatcagttaaggctattttgatgtcttttgtggatcttcagttacttcagaccatctggtgtatatgttcaagtcacaggggatgcgatggattggcttgggctcagaggcctgacactggccttccaggcaaagtcacccatttggcactcctccctggatggccctggttgtgggattgccgccagtcatgcctgggctctggcctctgctctgtcctccctcttgctctgcctgccctgtttctgagaagcctaggggcttcttggtctgcctcaatgtcttcaacccaaaagacttcccagtccatccgggagaaagttcctgggggtcggtgtcatgattgtttccctctccaaacctctttaagcatgattgggcaggtgtggtgatcctggagctctgggcttctatagctgtctgggacagggaagctttctgggtctctgtggcccaagtgatggctgcgtggtccgtccaggaagagcgggaggcaacccgaccattcctgacatttgccttctaggaaaggcagtgtggcatgccacctgcacttcctctctgattcttgagggccatcgggttcctctgctcctgggaaaagaggcttctagcgctgaatcttctggctgccacggatgtcagggagccaaagggactgggttttgctgggtgcaggggaggtggcatcacgggtacgtacccggtggcagggtgggggtgggagtggggtgaaatttgtggaaacctctcggcccctctggcaggcatccctgaatgtggcttggattcggtcgcaggccctgtctcgcaagttttcagctgcgcttggcttttcttcagctttgtggccgaggtctcccgtggcccacgggcgcacggctggacatcattgtccgtctcgccacgccccctacggcctcaaagacacccgctcactccatccgctcttgggcgacgtcagtgccacgggtggtcacactggctccatctcagactcgcctctgtctgtctttgcatgtgtcgtggaaagcagtgtcgggatgcccgagcccccgggccttggagatgaaggcaggccactgctccacccaggaaggagggaggcagtgggctcgtgggtcagttcattttccgccgacagcacgccttgcggccctggggatctttctgtgccccagcgagacccttcccgcctcactgcattgcaaccccattcccgatcacccggtgggatccatagtcggatctgaagaggagtccgcacagccaagccggcaccctgaagctcctcctccaccgggaaccgaagcagaagaccgatcaaggaggtcctgaggacaggactcctactggtccgaccctgggtctcccgcaggcccctctggcagtcctcttcccacccgccgccgcaagcgcgccaccgccgccaccgccgccccggtcccagcaacctgccgtgtcgccgccattttttaaagggtccgcagcctgcctctcccgagcgaggggagagtcggcctctccagtgcgcatgcgcgaggcccgagccgccacttgcgtcagtgatcaccaccgttgcaccggggtggattcctgagactgggccaagtaggagacctgtgtgaccgtgcgtcagagtcgtgcctgagaccagtcctggccagggcgttaacaggatggtctccggaggccgggattcgcggagggtcgaccagcagggagaagcctcaggaggaagaaacctcagacggatcgccggggaggcagcgcgggatcccagcctcaggtgtgcgcggacggtgtgcccgtgagtctccccaaaagtggtgcccttgtgatgtcgaggacaggtctgcccgtgtgcccgtgggctgctctttcacctctgggttgtagtcgcggagagcagaacccggcagcttcaggggctgcctggggctgggtgttacctgctgtatgtgtttgtgcttaggggtgtgtgtgtgtgtgtgtgtctgtgtgtctgtgtgcccacttatgtctctctctgatatctctctctctcgcttctcactctttccgtcgctctctgttactatctctgtccgtctgtgcgtgcgtgtttgctgggacacaggtgccctttgcgccggagggtggtttcttgcacatcagcctttcttgtggtcagcctctccccgggtctcttcctgcgtcgtgtggcccgttggcagtcgttttcccggcggttccagtttgggtttgtgaaggcctgggcaacgtgggcacctgcgtcggacccgcaggggttttcatcccctccctatcctgagcagcctctttgctgggatccagacgaacacaccccaaccaaggacgaaggactcagaggggctcattgtccaccagcaggagggtgcccacagatcttgaagaagacgcttctcactcctcttgccctttgccctccttgagaaatctagccacggctcgacacagagacggaggaggaagccggcaacgggatggggcaaacatctctgtgggtcagacgctggccttcgtggccaagtcaccggtttggcactcctccgcggatggccgtggtggtggcattgcggccaatcctgcctgggctctggcctctgctctgtcctccctcttgctccgcctgccctatttctgagaagcctaggggcttcttagtctggctcaatgtcttcaacccagaactcttcccagtacatccgggagaaagttcctgggggtcggtgtcatgattgtttccctctccaaacctctttcagcatgattgggcaggtgtggtgatcctggagctatgggcttccatagctgtctgggacggggaagctttctgagtctccgtgacccaagtgatggctgcgtggccggtccaggaagagcgggaggtaacccgaccgttcctgacatttgccttctaggaaaggtggtgtggcatgccacctgcacttcctctctgattcttgagggccatcgggttcctctgctcctggggaaggaggcttctagcgctgaatcttctggctgccatggatgtcagggagccaaagggactgggttttgctgggtgcaggggaggtggcgtcatgggtacctaccccgtggcggggtgggggtgggagtggggtgaaatttgtggaaacctctcggcccctctggcaggcatccctgaatgtggcttggattcggacgcgggccctgtctcgcaggttttcagctgcccttggcttttcttcagctttgtggctgacgtctcccgtggcccacgggcgcacgcctggacatcactgtccgtctcgtcgtcgccccctacggcctcaaagacacacgctgcctgcatgtgctcttgggggacgacagtgccacatgtggacacactggctccagctcggactcgcctctgtctctctttgcccgtgtcgccggaagccgcgtcgggatgccggagccctcgggccttggagatgaaggcaggcccctgctcctgccaggaaggagggaggcagcgggctcatgggtcggtgcctttgcagccaacagcacgccttgcggccctggggatcttcctgtgccccggcgagaccctttccgcctcactgcattggaaccccattcccgatcacccgctgggatccatcatcggaccccaagaggagtccgcgcagcccagccggcaccccgaagctcctccttcagcgggaaccgaagcagaagagcgatcaaggaggtcctcaccacaggactcctatgggtccgaccctgggtctcccgcaggcccctctggcagtcctcttcccacccgccgcctcgggctgcgccttcgccgccgccgccgcaacctccagcaccgccgccccaggccccgcagccgccgcgtcgccgccattttttaaagggtccgcagcctgactctgcgaagtaagggcgggtggagcgggggagtcggcctcgccagcgcgcatgcgcaaggcccgagccgccgcttgggtcacagtgaaagccaccgttgcccggggatgggtccctgacacttggggaagtaggagccctgtgtgatcgtgcgtctgagtctgggctgagaccagtcctggccagggcagttaccaggacggtctccggaggccgggattcgcggagggtccagcagcaggaagaaaccccaggaggaagaaacctcagacagatcgccggcgaggcagcgcgggatcccagcctcaggcgtgcgcggacggtgtgcgggtgagtctccccaaaagtggagcccttgtgatgacgagcacaggtccgcctgcgtgcccgtgggctgctctctcaccggtggctctcagtcgcggagagcagaacccggcagcttcaggggctgcctgcgggtgggtgttccctgctgtacgtgtgtgttcgtcatgggtgtgtgtgtgtgtgtgttggggggggtgcgtctgtgtgtgtgcgcgcgcagtgcctgtctgtgtgtcgacttctgtctctctctcacgtctctctctctctctctctctctctctctccctctccctctctcccttctcgctctttccgtggccctctctttctgtctctgtccgtctgtgtgtgcgtgcgcctcgggacacatgtgccctgtgcgccggagggtgggtttcttgcacgtcggcctttcttctggtcagcctctccccgcgtctctgcctgggtcgtgtggccggttggcagtcgtcgtcccggcggttccagtttgggggtctgtgaaggcctgggcaacgtgggcatcggcgtcggacccgcaggggttttcatcccctccccatccggagcagcctctttgctaggctggatccagacgagcgctccccaaccaaggacaacggcctcccaggcgctcatcgtccacccgcaggagggtgcccgcagagcttcaagaaggtggttgtcacgcctgtcgccctctgccctcatcgagaaatgtagccacagctcgacgcagggacggagaaggaagccggcaaggggatggggcaagcatgtctgtctctcaaaggctggccttcctggctgagtcacccgtttgacactcctccccggatgccggtggtggtggcatggcccccccgtatcctgcctgggctctggcctctgctctgacctccctcttgctgtgtctgccccgtctctgagaagcctggcggcttcttagtgtggctcagtgtcttccacaaagaagacttccccgtccatcagggagaaacctcgtggcggtccgcgtcatgcttgtttccctctccacacctctttctggatgattgggcagctgtggtgatcctggagctctgggcttccatacctgtgtgggacagggaagctctctcggtctccatggcccaagtgatggctgcacgctcggtccaggaagaggcggaggcaagcccaccgctcctgacattggccttctaggaaaggcggtgttgcatcccacctgcacttcctctctgattcttgagagccaaccgcttcctccgctcctggggaaagtgccttctagcaccgaatgttttggctgccacggatgtcagggagccaacgggactgggttttggctgggtgcaggggaggttgcgtcaggggtacctagccggcggcgggctgggggtggggtgtactttgtccaaacctctcggctcctctggcgggcctccctgaacgtggcgtggactcgcgcacaggccctgtctcgcaggttttcaggtgcgcttggcttttcctccgctttgtggggcaggtctccagtggccccccgggcgcacgcctggacatcactgtccgtctcgtcgtcgccccctacggcctcaaagacacacgctgcctgcatgtgctcttgggggacgacagtgccacatgtggacacactggctccagctcggactcgcctctgtctctctttgcccgtgtcgccggaagccgcctcgggttgccggagccctcgggccttggagatgaaggcaggcccctgctcctgccaggaaggagggaggcagtgggctcatgggtcggtgcctttgcagccgacagcacgccttgcggccctggggatcttcctgtgccccggcgagaccctttccgcctcactgcattggaaccccattcccgatcacccgctgggatccatcatcggaccccaagaggagtccgcgcagcccagccggcaccccgaagctcctccttcagcgggaaccgaagcagaagagcgttcaaggaggtcctcaccacaggactcctatgggtccgaccctgggtctcccgcaggcccctctggcagtcctcttcccacccgccgcctcgggctgcgccttcgccgccgccgccgcaacctccagcaccgccgccccaggccccgcagccgccgcgtcgccgccattttttaaagggtccgcagcctgactctgcggagtaagggggggtggagcgggggagtcggcctcgccagcgcgcatgcgcgaggcccgagccgccgcttgggtcacagtgaaagccaccgttgcccggggatgggtccctgacacttggggaagtaggagccctgtgtgatcgtgcgtctgagtctgggctgagaccagtcctggccagggcagttaccaggacggtctccggaggccgggattcgcggagggtccagcagcaggaagaaaccccaggaggaagaaacctcagacagatcgccggcgaggcagcgcgggatcccagcctcaggcgtgcgcggacggtgtgcgggtgagtctccccaaaagtggagcccttgtgatgacgagcacaggtccgcctgcgtgcccgtgggcggctctctcaccgctggctctcagtcgcggagagcagaacccggcagcttcaggggctgcctgcgggagggtgttccctgctgtacgtgtgtgttcgtcatgggtgtgtgtgtttgtgtgttggggggggtgcgtctgtgtgtgtgcgcgcgcagtgcctgtctgtgtgcggacttctgtctctctctcaggtctctctctctctctctctctcccttctcgctctttccgtggccctctctttctgtctctgtccgtctgtgtgtgcgtgcgcctcgggacacatgtgccctgtgcgccggagggtgggtttcttgcacgtcggcctttcttctggtcagcctctccccgcgtctctgcctgggtcgtgtggccggttggcagtcgtcgtcccggcggttccagtttgggggtctgtgaaggcctgggcaacgtgggcatcggcgtcggacccgcaggggttttcatcccctccccatccggagcagcctctttgctaggctggatccagacgagcgctccccaaccaaggacaacggcctcccaggcgctcatcgtccacccgcaggagggtgcccgcagagcttcaagaaggtggttgtcacgcctgtcgccctctgccctcatcgagaaatgtagccacagctcgacgcagggacggagaaggaagccggcaaggggatggggcaagcatgtctgtctctcaaaggctggccttcctggccgagtcacccgtttgacactcctccccggatgccggtggtggtggcatggcccccccgtatcctgcctgggctctggcctctgctctgacctccctcttgctgtgtctgccccgtctctgagaagcctggcggcttcttagtgtggctcagtgtcttccacaaagaagacttccccgtccatcagggagaaacctcgtggcggtccgcgtcatgcttgtttccctctccacacctctttctggatgattgggcagctgtggtgatcctggagctctgggcttccatacctgtgtgggacagggaagctctctcggtctccatggcccaagtgatggctgcacgctcggtccaggaagaggcggaggcaagcccaccgctcctgacattggccttctaggaaaggcggtgttgcatcccacctgcacttcctctctgattcttgagggccaaccgcttcctccgctcctggggaaagtgccttctagcaccgaatcttttggctgccacggatgtcagggagccaacgggactgggttttggctgggtgcaggggaggttgcgtcaggggaacctagccggcggcgggctgggggtggggtgtactttgtccaaacctctcggctcctctggcgggcctccctgaacgtggcgtggactcgcgcacaggccctgtctcgcaggttttcaggtgcgcttggcttttcctccgctttgtggggcaggtctccagtggccccccgggcgcacgcctggacatcactgtccgtctcgtcgtcgccccctacggcctcaaagacacacgctgcctgcatgtgctcttgggggacgacagtgccacatgtggacacactggctccagctcggactcgcctctgtctctctttgcccgtgtcgccggaagccgcctcgggttgccggagccctcgggccttggagatgaaggcaggcccctgctcctgccaggaaggagggaggcagtgggctcatgggtcggtgcctttgcagccgacagcacgccttgcggccctggggatcttcctgtgccccggcgagaccctttccgcctcactgcattggaaccccattcccgatcacacgctgggatccatcatcggaccccaagaggagtccgcgcagcccagccggcaccccgaagctcctccttcagtgggaaccgaagcagaagagcgatcaaggaggtcctcaccacaggactcatgggtccgaccatgggtctcccgcaggcccctctggcagtcctcttcccacccgccgcctcgggctgcgccttcgccgccgccgccgcaacctccagcaccgccgccccaggccccgcagccgccgcgtcgccgccattttttaaagggtccgcagcctgactctgcggagtaagggggggtggagcgggggagtcggcctcgccagcgcgcatgcgcgaggcccgagccgccgcttgggtcacagtgaaagccaccgttgcccggggatgggtccctgacacttggggaagtaggagccctgtgtgatcgtgcgtctgagtctgggctgagaccagtcctggccagggcagttaccaggacggtctccggaggccgggattcgcggagggtccagcagcaggaagaaaccccaggaggaagaaacctcagacagatcgccggcgaggcagcgcgggatcccagcctcaggcgtgcgcggacggtgtgcgggtgagtctccccaaaagtggagcccttgtgatgacgagcacaggtccgcctgcgtgcccgtgggctgctctctcaccggtggctctcagtcgcggagagcagaacccggcagcttcaggggctgcctgcgggagggtgttccctgctgtacgtgtgtgttcgtcatgggtgtgtgtgtgtgtgtgttggggggggtgcgtctgtgtgtgtgtctgtgtgtgtgcgcgcgcagtgcctgtctgtgtgccgacttctgtctctctctcacgtctctctctctctctctctctctctctgtctctctctctctctctctctctcccttctcgctctttccgtggccctctctttctgtctctgtccgtctgtgtgtgcgtgcgcctcgggacacatgtgccctgtgcgccggagggtgggtttcttgcacgtcggcctttcttctggtcagcctctccccgcgtctctgcctgggtcgtgtggccggttggcagtcgtcgtcccggcggttccagtttgggggtctgtgaaggcctgggcaacgtgggcatcggcgtcggacccgcaggggttttcatcccctccccatccggagcagcctctttgctaggctggatccagacgagcgctccccaaccaaggacaacggcctcccaggcgctcatcgtccacccgcaggagggtgcccgcagagcttcaagaaggtggttgtcacgcctgtcgccctctgccctcatcgagaaatgtagccacagctcgacgcagggacggagaaggaagccggcaaggggatggggcaagcatgtctgtctctcaaaggctggccttcctggccgagtcacccgtttgacactcctccccggatgccggtggtggtggcatggcccccccgtatcctgcctgggctctggcctctgctctcacctccctcttgctgtgtctgccccgtctctgagaagcctggcggcttcttagtgtggctcagtgtcttccacaaagaagacttccccgtccatcagggagaaacctcgtggcggtccgcgtcatgattgtttccctctccacacctctttctggatgattgggcagctgtggtgatcctggagctctgggcttccatacctgtgtgggacagggaagctctctcggtctccatggcccaagtgatggctgcacgctcggtccaggaagaggcggaggcaagcccaccgctcctgacattggccttctaggaaaggcggtgttgcatcccacctgcacttcctctctgattcttgagggccaaccgcttcctccgctcctggggaaagtgccttctagcaccgaatgttttggctgccacggatgtcagggagccaacgggactgggttttggctgggtgcaggggaggttgcgtcaggggtacctagccggcggcgggctgggggtggggtgtactttgtccaaacctctcggctcctctggcgggcctccctgaacgtggcgtggactcgcgcacaggccctgtctcgcaggttttcaggtgcgcttggcttttcctccgctttgtggggcaggtctccagtggccccccgggcgcacgcctggacatcactgtccgtctcgtcgtcgccccctacggcctcaaagacacacgctgcctgcatgtgctcttgggggacgacagtgccacatgtggacacactggctccagctcggactcgcctctgtctctctttgcccgtgtcgccggaagccgcctcgggttgccggagccctcgggccttggagatgaaggcaggcccctgctcctgccaggaaggagggaggcagtgggctcatgggtcggtgcctttgcagccgacagcacgccttgcggccctggggatcttcctgtgccccggcgagaccctttccgcctcactgcattggaaccccattcccgatcacccgctgggatccatcatcggaccccaagaggagtccgcgcagcccagccggcaccccgaagctcctccttcagtgggaaccgaagcagaagagcgatcaaggaggtcctcaccacaggactcctatgggtccgaccctgggtctcccgcaggcccctctggcagtcctcttcccacccgccgcctcgggctgcgccttcgccgccgccgccgcaacctccagcaccgccgccccaggccccgcagccgccgcgtcgccgccattttttaaagggtccgcagcctgactctgcggagtaagggggggtggagcgggggagtcggcctcgccagcgcgcatgcgcgaggcccgagccgccgcttgggtcacagtgaaagccaccgttgcccggggatgggtccctgacacttggggaagtaggagccctgtgtgatcgtgcgtctgagtctgggctgagaccagtcctggccagggcagttaccaggacggtctccggaggccgggattcgcggagggtccagcagcaggaagaaaccccaggaggaagaaacctcagacagatcgccggcgaggcagcgcgggatcccagcctcaggcgtgcgcggacggtgtgcgggtgagtctccccaaaagtggagcccttgtgatgacgagcacaggtccgcctgcgtgcccgtgggctgctctctcaccggtggctctcagtcgcggagagcagaacccggcagcttcaggggctgcctgcgggagggtgttccctgctgtacgtgtgtgttcgtcatgggtgtgtgtgtgtgtgtgttggggggggtgcgtctgtgtgtgtgtctgtgtgtgtgcgcgcgcagtgcctgtctgtgtgccgacttctgtctctctctcacgtctctctctctctctctctctctctctctctctctctctctctccctctccctctccctctctcccttctcgctctttccgtggccctctctttctgtctctgtccgtctgtgtgtgcgtgcgcctcgggacacatgtgccctgtgcgccggagggtgggtttcttgcacgtcggcctttcttctggtcagcctctccccgcgtctctgtctgggtcgtgtggccggttggcagtcgtcgtcccggcggttccagtttgggggtctgtgaaggcctgggcaacgtgggcatcggcgtcggacccgcaggggttttcatcccctccccatccggagcagcctctttgctaggctggatccagacgagcgctccccaaccaaggacaacggcctcccaggcgctcatcgtccacccgcaggagggtgcccgcagagcttcaagaaggtggttgtcacgcctgtcgccctctgccctcatcgagaaatgtagccacagctcgacgcagggacggagaaggaagccggcaaggggatggggcaagcatgtctgtctctcaaaggctggccttcctggccgagtcacccgtttgacactcctccccggatgccggtggtggtggcatggcccccccgtatcctgcctgggctctggcctctgctctgacctccctcttgctgtgtctgccccgtctctgagaagcctggcggcttcttagtgtggctcagtgtcttccacaaagaagacttccccgtccatcagggagaaacctcgtggcggtccgcgtcatgcttgtttccctctccacacctctttctggatgattgggcagctgtggtgatcctggagctctgggcttccatacctgtgtgggacagggaagctctctcggtctccatggcccaagtgatggctgcacgctcggtccaggaagaggcggaggcaagcccaccgctcctgacattggccttctaggaaaggcggtgttgcatcccacctgcacttcctctctgattcttgagggccaaccgcttcctccgctcctggggaaagtgccttctagcaccgaatcttttggctgccacggatgtcagggagccaacgggactgggttttggctgggtgcaggggaggttgcgtcaggggtacctagccggcggcgggctgggggtggggtgtactttgtccaaacctctcggctcctctggcgggcctccctgaacgtggcgtggactcgcgcacaggccctgtctcgcaggttttcaggtgcgcttggcttttcctccgctttgtggggcaggtctccagtggccccccgggcgcacgcctggacatcactgtccgtctcgtcgtcgccccctacggcctcaaagacacacgctgcctgcatgtgctcttgggggacgacagtgccacatgtggacacgctggctccagctcggactcgcctctgtctctctttgcccgtgtcgccggaagccgcctcgggttgccggagccctcgggccttggagatgaaggcaggcccctgctcctgccaggaaggagggaggcagtgggctcatgggtcggtgcctttgcagccgacagcacgccttgcggccctggggatcttcctgtgccccggcgagaccctttccgcctcactgcattggaaccccattcccgatcacccgctgggatccatcatcggaccccaagaggagtccgcgcagcccagccggcaccccgaagctcctccttcagtgggaaccgaagcagaagagcgatcaaggaggtcctcaccacaggactcatgggtccgaccatgggtctcccgcaggcccctctggcagtcctctccccacccgccgcctcgggctgcgccttcgccgccgccgccgcaacctccagcaccgccgccccaggccccgcagccgccgcgtcgccgccattttttaaagggtccgcagcctgactctgcggagtaagggggggtggagcgggggagtcggcctcgccagcgcgcatgcgcgaggcccgagccgccgcttgggtcacagtgaaagccaccgttgcccggggatgggtccctgacacttggggaagtaggagccctgtgtgatcgtacgtctgagtctgggctgagaccagtcctggccagggcagttaccaggacggtctccggaggccgggattcgcggagggtccagcagcaggaagaaaccccaggaggaagaaacctcagacagatcgccggcgaggcagcgcgggatcccagcctcaggcgtgcgcggacggtgtgcgggtgagtctccccaaaagtggagcccttgtgatgacgagcacaggtccgcctgcgtgcccgtgggctgctctctcaccggtggctctcagtcgcggagagcagaacccggcagcttcaggggctgcctgcgggagggtgttccctgctgtacgtgtgtgttcgtcatgggtgtgtgtgtgtgtgtgttgggggggtgcgtctgtgtgtgtgtctgtgtgtgtgcgcgcgcagtgcctgtctgtgtgccgacttctgtctctctctcacgtctctctctctctctctctctctctctctctctctctctctgtctcccttctcgctctttccgtggccctctctttctgtctctgtccgtctgtgtgtgcgtgcgcctcgggacacatgtgccctgtgcgccggagggtgggtttcttgcacgtcggcctttcttctggtcagcctctccccgcgtctctgcctgggtcgtgtggccggttggcagtcgtcgtcccggcggttccagtttgggggtctgtgaaggcctgggcaacgtgggcatcggcgtcggacccgcaggggttttcatcccctccccatccggagcagcctctttgctaggctggatccagacgagcgctccccaaccaaggacaacggcctcccaggcgctcatcgtccacccgcaggagggtgcccgcagagcttcaagaaggtggttgtcacgcctgtcgccctctgccctcatcgagaaatgtagccacagctcgacgcagggacggagaaggaagccggcaaggggatggggcaagcatgtctgtctctcaaaggctggccttcctggccgagtcacccgtttgacactcctccccggatgccggtggtggtggcatggcccccccgtatcctgcctgggctctggcctctgctctgacctccctcttgctgtgtctgccccgcctctgagaagcctggcggcttcttagtgtggctcagtgtcttccacaaagaagacttccccgtccatcagggagaaacctcgtggcggtccgcgtcatgcttgtttccctctccacacctctttctggatgattgggcagctgtggtgatcctggagctctgggcttccatacctgtgtgggacagggaagctctctcggtctccatggcccaagtgatggctgcacgctcggtccaggaagaggcggaggcaagcccaccgctcctgacattggccttctaggaaaggcggtgttgcatcccacctgcacttcctctctgattcttgagggccaaccgcttcctccgctcctggggaaagtgccttctagcaccgaatcttttggctgccacggatgtcagggagccaacgggactgggttttggctgggtgcaggggaggttgcgtcaggggtacctagccggcggcgggctgggggtggggtgtactttgtccaaacctctcggctcctctggcgggcctccctgaacgtggcgtggactcgcgcacaggccctgtctcgcaggttttcaggtgcgcttggcttttcctccgctttgtggggcaggtctccagtggccccccgggcgcacgcctggacatcactgtccgtctcgtcgtcgccccctacggcctcaaagacacacgctgcctgcatgtgctcttgggggacgacagtgccacatgtggacacactggctccagctcggactcgcctctgtctctctttgcccgtgtcgccggaagccgcctcgggttgccggagccctcgggccttggagatgaaggcaggcccctgctcctgccaggaaggagggaggcagtgggctcatgggtcggtgcctttgcagccgacagcacgccttgcggccctggggatcttcctgtgccccggcgagaccctttccgcctcactgcattggaaccccattcccgatcacccgctgggatccatcatcggaccccaagaggagtccgcgcagcccagccggcaccccgaagctcctccttcagtgggaaccgaagcagaagagcgatcaaggaggtcctcaccacaggactcatgggtccgaccatgggtctcccgcaggcccctctggcagtcctcttcccacccgccgcctcgggctgcgccttcgccgccgccgccgcaacctccagcaccgccgccccaggccccgcagccgccgcgtcgccgccattttttaaagggtccgcagcctgactctgcggagtaagggggggtggagcgggggagtcggcctcgccagcgcgcatgcgcgaggcccgagccgccgcttgggtcacagtgaaagccaccgttgcccggggatgggtccctgacacttggggaagtaggagccctgtgtgatcgtgcgtctgagtctgggctgagaccagtcctggccagggcagttaccaggacggtctccggaggccgggattcgcggagggtccagcagcaggaagaaaccccaggaggaagaaacctcagacagatcgccggcgaggcagcgcgggatcccagcctcaggcgtgcgcggacggtgtgcgggtgagtctccccaaaagtggagcccttgtgatgacgagcacaggtccgcctgcgtgcccgtgggctgctctctcaccggtggctctcagtcgcggagagcagaacccggcagcttcaggggctgcctgcgggagggtgttccctgctgtacgtgtgtgttcgtcatgggtgtgtgtgtgtgtgtgttggggggggtgcgtctgtgtgtgtgtctgtgtgtgtgcgcgcgcagtgcctgtctgtgtgccgacttctgtctctctctcacgtctctctctctctctctctctctctctctctctccctctccctctctcccttctcgctctttccgtggccctctctttctgtctctgtccgtctgtgtgtgcgtgcgcctcgggacacatgtgccctgtgcgccggagggtgggtttcttgcacgtcggcctttcttctggtcagcctctccccgcgtctctgtctgggtcgtgtggccggttggcagtcgtcgtcccggcggttccagtttgggggtctgtgaaggcctgggcaacgtgggcatcggcgtcggacccgcaggggttttcatcccctccccatccggagcagcctctttgctaggctggatccagacgagcgctccccaaccaaggacaacggcctcccaggcgctcatcgtccacccgcaggagggtgcccgcagagcttcaagaaggtggttgtcacgcctgtcgccctctgccctcatcgagaaatgtagccacagctcgacgcagggacggagaaggaagccggcaaggggatggggcaagcatgtctgtctctcaaaggctggccttcctggccgagtcacccgtttgacactcctccccggatgccggtggtggtggcatggcccccccgtatcctgcctgggctctggcctctgctctgacctccctcttgctgtgtctgccccgtctctgagaagcctggcggcttcttagtgtggctcagtgtcttccacaaagaagacttccccgtccatcagggagaaacctcgtggcggtccgcgtcatgattgtttccctctccacacctctttctggatgattgggcagctgtggtgatcctggagctctgggcttccatacctgtgtgggacagggaagctctctcggtctccatggcccaagtgatggctgcacgctcggtccaggaagaggcggaggcaagcccaccgctcctgacattggccttctaggaaaggcggtgttgcatcccacctgcacttcctctctgattcttgagggccaaccgcttcctccgctcctggggaaagtgccttctagcaccgaatcttttggctgccacggatgtcagggagccaacgggactgggttttggctgggtgcaggggaggttgcgtcaggggtacctagccggcggcgggctgggggtggggtgtactttgtccaaacctctcggctcctctggcgggcctccctgaacgtggcgtggactcgcgcacaggccctgtctcgcaggttttcaggtgcgcttggcttttcctccgctttgtggggcaggtctccagtggccccccgggcgcacgcctggacatcactgtccgtctcgtcgtcgccccctacggcctcaaagacacacgctgcctgcatgtgctcttgggggacgacagtgccacatgtggacacgctggctccagctcggactcgcctctgtctctctttgcccgtgtcgccggaagccgcctcgggttgccggagccctcgggccttggagatgaaggcaggcccctgctcctgccaggaaggagggaggcagtgggctcatgggtcggtgcctttgcagccgacagcacgccttgcggccctggggatcttcctgtgccccggcgagaccctttccgcctcactgcattggaaccccattcccgatcacccgctgggatccatcatcggaccccaagaggagtccgcgcagcccagccggcaccccgaagctcctccttcagtgggaaccgaagcagaagagcgatcaaggaggtcctcaccacaggactcctatgggtccgaccctgggtctcccgcaggcccctctggcagtcctcttcccacccgccgcctcgggctgcgccttcgccgccgccgccgcaacctccagcaccgccgccccaggccccgcagccgccgcgtcgccgccattttttaaagggtccgcagcctgactctgcggagtaagggggggtggagcgggggagtcggcctcgccagcgcgcatgcgcgaggcccgagccgccgcttgggtcacagtgaaagccaccgttgcccggggatgggtccctgacacttggggaagtaggagccctgtgtgatcgtgcgtctgagtctgggctgagaccagtcctggccagggcagttaccaggacggtctccggaggccgggattcgcggagggtccagcagcaggaagaaaccccaggaggaagaaacctcagacagatcgccggcgaggcagcgcgggatcccagcctcaggcgtgcgcggacggtgtgcgggtgagtctccccaaaagtggagcccttgtgatgacgagcacaggtccgcctgcgtgcccgtgggctgctctctcaccggtggctctcagtcgcggagagcagaacccggcagcttcaggggctgcctgcgggagggtgttccctgctgtacgtgtgtgttcgtcatgggtgtgtgtgtgtgtgtgttggggggggtgcgtctgtgtgtgtgtctgtgtgtgtgcgcgcgcagtgcctgtctgtgtgccgacttctgtctctctctcacgtctctctctctctctctctctctctctctctctctctgtctcccttctcgctctttccgtggccctctctttctgtctctgtccgtctgtgtgtgcgtgcgcctcgggacacatgtgccctgtgcgccggagggtgggtttcttgcacgtcggcctttcttctggtcagcctctccccgcgtctctgcctgggtcgtgtggccggttggcagtcgtcgtcccggcggttccagtttgggggtctgtgaaggcctgggcaacgtgggcatcggcgtcggacccgcaggggttttcatcccctccccatccggagcagcctctttgctaggctggatccagacgagcgctccccaaccaaggacaacggcctcccaggcgctcatcgtccacccgcaggagggtgcccgcagagcttcaagaaggtggttgtcacgcctgtcgccctctgccctcatcgagaaatgtagccacagctcgacgcagggacggagaaggaagccggcaaggggatggggcaagcatgtctgtctctcaaaggctggccttcctggccgagtcacccgtttgacactcctccccggatgccggtggtggtggcatggcccccccgtatcctgcctgggctctggcctctgctctgacctccctcttgctgtgtctgccccgcctctgagaagcctggcggcttcttagtgtggctcagtgtcttccacaaagaagacttccccgtccatcagggagaaacctcgtggcggtccgcgtcatgattgtttccctctccacacctctttctggatgattgggcagctgtggtgatcctggagctctgggcttccatacctgtgtgggacagggaagctctctcggtctccatggcccaagtgatggctgcacgctcggtccaggaagaggcggaggcaagcccaccgctcctgacattggccttctaggaaaggcggtgttgcatcccacctgcacttcctctctgattcttgagggccaaccgcttcctccgctcctggggaaagtgccttctagcaccgaatcttttggctgccacggatgtcagggagccaacgggactgggttttggctgggtgcaggggaggttgcgtcaggggtacctagccggcggcgggctgggggtggggtgtactttgtccaaacctctcggctcctctggcgggcctccctgaacgtggcgtggactcgcgcacaggccctgtctcgcaggttttcaggtgcgcttggcttttcctccgctttgtggggcaggtctccagtggccccccgggcgcacgcctggacatcactgtccgtctcgtcgtcgccccctacggcctcaaagacacacgctgcctgcatgtgctcttgggggacgacagtgccacatgtggacacactggctccagctcggactcgcctctgtctctctttgcccgtgtcgccggaagccgcctcgggttgccggagccctcgggccttggagatgaaggcaggcccctgctcctgccaggaaggagggaggcagtgggctcatgggtcggtgcctttgcagccgacagcacgccttgcggccctggggatcttcctgtgccccggcgagaccctttccgcctcactgcattggaaccccattcccgatcacccgctgggatccatcatcggaccccaagaggagtccgcgcagcccagccggcaccccgaagctcctccttcagtgggaaccgaagcagaagagcgatcaaggaggtcctcaccacaggactcatgggtccgaccctgggtctcccgcaggcccctctggcagtcctctccccacccgccgcctcgggctgcgccttcgccgccgccgccgcaacctccagcaccgccgccccaggccccgcagccgccgcgtcgccgccattttttaaagggtccgcagcctgactctgcggagtaagggggggtggagcgggggagtcggcctcgccagcgcgcatgcgcgaggcccgagccgccgcttgggtcacagtgaaagccaccgttgcccggggatgggtccctgacacttggggaagtaggagccctgtgtgatcgtacgtctgagtctgggctgagaccagtcctggccagggcagttaccaggacggtctccggaggccgggattcgcggagggtccagcagcaggaagaaaccccaggaggaagaaacctcagacagatcgccggcgaggcagcgcgggatcccagcctcaggcgtgcgcggacggtgtgcgggtgagtctccccaaaagtggagcccttgtgatgacgagcacaggtccgcctgcgtgcccgtgggctgctctctcaccggtggctctcagtcgcggagagcagaacccggcagcttcaggggctgcctgcgggagggtgttccctgctgtacgtgtgtgttcgtcatgggtgtgtgtgtgtgtgtgttgggggggtgcgtctgtgtgtgtgtctgtgtgtgtgcgcgcgcagtgcctgtctgtgtgccgacttctgtctctctctcacgtctctctctctctctctctctctctctctctctctctctctctgtctcccttctcgctctttccgtggccctctctttctgtctctgtccgtctgtgtgtgcgtgcgcctcgggacacatgtgccctgtgcgccggagggtgggtttcttgcacgtcggcctttcttctggtcagcctctccccgcgtctctgcctgggtcgtgtggccggttggcagtcgtcgtcccggcggttccagtttgggggtctgtgaaggcctgggcaacgtgggcatcggcgtcggacccgcaggggttttcatcccctccccatccggagcagcctctttgctaggctggatccagacgagcgctccccaaccaaggacaacggcctcccaggcgctcatcgtccacccgcaggagggtgcccgcagagcttcaagaaggtggttgtcacgcctgtcgccctctgccctcatcgagaaatgtagccacagctcgacgcagggacggagaaggaagccggcaaggggatggggcaagcatgtctgtctctcaaaggctggccttcctggccgagtcacccgtttgacactcctccccggatgccggtggtggtggcatggcccccccgtatcctgcctgggctctggcctctgctctgacctccctcttgctgtgtctgccccgtctctgagaagcctggcggcttcttagtgtggctcagtgtcttccacaaagaagacttccccgtccatcagggagaaacctcgtggcggtccgcgtcatgattgtttccctctccacacctctttctggatgattgggcagctgtggtgatcctggagctctgggcttccatacctgtgtgggacagggaagctctctcggtctccatggcccaagtgatggctgcacgctcggtccaggaagaggcggaggcaagcccaccgctcctgacattggccttctaggaaaggcggtgttgcatcccacctgcacttcctctctgattcttgagggccaaccgcttcctccgctcctggggaaagtgccttctagcaccgaatcttttggctgccacggatgtcagggagccaacgggactgggttttggctgggtgcaggggaggttgcgtcaggggtacctagccggcggcgggctgggggtggggtgtactttgtccaaacctctcggctcctctggcgggcctccctgaacgtggcgtggactcgcgcacaggccctgtctcgcaggttttcaggtgcgcttggcttttcctccgctttgtggggcaggtctccagtggccccccgggcgcacgcctggacatcactgtccgtctcgtcgtcgccccctacggcctcaaagacacacgctgcctgcatgtgctcttgggggacgacagtgccacatgtggacacactggctccagctcggactcgcctctgtctctctttgcccgtgtcgccggaagccgcctcgggttgccggagccctcgggccttggagatgaaggcaggcccctgctcctgccaggaaggagggaggcagtgggctcatgggtcggtgcctttgcagccgacagcacgccttgcggccctggggatcttcctgtgccccggcgagaccctttccgcctcactgcattggaaccccattcccgatcacccgctgggatccatcatcggaccccaagaggagtccgcgcagcccagccggcaccccgaagctcctccttcagtgggaaccgaagcagaagagcgatcaaggaggtcctcaccacaggactcctatgggtccgaccctgggtctcccgcaggcccctctggcagtcctcttcccacccgccgcctcgggctgcgccttcgccgccgccgccgcaacctccagcaccgccgccccaggccccgcagccgccgcgtcgccgccattttttaaagggtccgcagcctgactctgcggagtaagggggggtggagcgggggagtcggcctcgccagcgcgcatgcgcgaggcccgagccgccgcttgggtcacagtgaaagccaccgttgcccggggatgggtccctgacacttggggaagtaggagccctgtgtgatcgtgcgtctgagtctgggctgagaccagtcctggccagggcagttaccaggacggtctccggaggccgggattcgcggagggtccagcagcaggaagaaaccccaggaggaagaaacctcagacagatcgccggcgaggcagcgcgggatcccagcctcaggcgtgcgcggacggtgtgcgggtgagtctccccaaaagtggagcccttgtgatgacgagcacaggtccgcctgcgtgcccgtgggctgctctctcaccggtggctctcagtcgcggagagcagaacccggcagcttcaggggctgcctgcgggagggtgttccctgctgtacgtgtgtgttcgtcatgggtgtgtgtgtgtgtgtgttggggggggtgcgtctgtgtgtgtgtctgtgtgtgtgcgcgcgcagtgcctgtctgtgtgccgacttctgtctctctctcacgtctctctctctctctctctctctctctctctctctctctctgtctcccttctcgctctttccgtggccctctctttctgtctctgtccgtctgtgtgtgcgtgcgcctcgggacacatgtgccctgtgcgccggagggtgggtttcttgcacgtcggcctttcttctggtcagcctctccccgcgtctctgcctgggtcgtgtggccggttggcagtcgtcgtcccggcggttccagtttgggggtctgtgaaggcctgggcaacgtgggcatcggcgtcggacccgcaggggttttcatcccctccccatccggagcagcctctttgctaggctggatccagacgagcgctccccaaccaaggacaacggcctcccaggcgctcatcgtccacccgcaggagggtgcccgcagagcttcaagaaggtggttgtcacgcctgtcgccctctgccctcatcgagaaatgtagccacagctcgacgcagggacggagaaggaagccggcaaggggatggggcaagcatgtctgtctctcaaaggctggccttcctggccgagtcacccgtttgacactcctccccggatgccggtggtggtggcatggcccccccgtatcctgcctgggctctggcctctgctctgacctccctcttgctgtgtctgccccgcctctgagaagcctggcggcttcttagtgtggctcagtgtcttccacaaagaagacttccccgtccatcagggagaaacctcgtggcggtccgcgtcatgattgtttccctctccacacctctttctggatgattgggcagctgtggtgatcctggagctctgggcttccatacctgtgtgggacagggaagctctctcggtctccatggcccaagtgatggctgcacgctcggtccaggaagaggcggaggcaagcccaccgctcctgacattggccttctaggaaaggcggtgttgcatcccacatgcacttcctctctgattcttgagggccaaccgcttcctccgctcctggggaaagtgccttctagcaccgaatcttttggctgccacggatgtcagggagccaacgggactgggttttggctgggtgcaggggaggttgcgtcaggggtacctagccggcggcgggctgggggtggggtgtactttgtccaaacctcttggctcctctggcgggcctccctgaacgtggcgtggactcgcgcacaggccctgtctcgcaggttttcaggtgcgcttggcttttcctccgctttgtggggcaggtctccagtggccccccgggcgcacgcctggacatcactgtccgtctcgtcgtcgccccctacggcctcaaagacacacgctgcctgcatgtgctcttgggggacgacagtgccacatgtggacacactggctccagctcggactcgcctctgtctctctttgcccgtgtcgccggaagccgcctcgggttgccggagccctcgggccttggagatgaaggcaggcccctgctcctgccaggaaggagggaggcagtgggctcatgggtcggtgcctttgcagccgacagcacgccttgcggccctggggatcttcctgtgccccggcgagaccctttccgcctcactgcattggaaccccattcccgatcacccgctgggatccatcatcggaccccaagaggagtccgcgcagcccagccggcaccccgaagctcctccttcagtgggaaccgaagcagaagagcgatcaaggaggtcctcaccacaggactcatgggtccgaccctgggtctcccgcaggcccctctggcagtcctctccccacccgccgcctcgggctgcgccttcgccgccgccgccgcaacctccagcaccgccgccccaggccccgcagccgccgcgtcgccgccattttttaaagggtccgcagcctgactctgcggagtaagggggggtggagcgggggagtcggcctcgccagcgcgcatgcgcgaggcccgagccgccgcttgggtcacagtgaaagccaccgttgcccggggatgggtccctgacacttggggaagtaggagccctgtgtgatcgtacgtctgagtctgggctgagaccagtcctggccagggcagttaccaggacggtctccggaggccgggattcgcggagggtccagcagcaggaagaaaccccaggaggaagaaacctcagacagatcgccggcgaggcagcgcgggatcccagcctcaggcgtgcgcggacggtgtgcgggtgagtctccccaaaagtggagcccttgtgatgacgagcacaggtccgcctgcgtgcccgtgggctgctctctcaccggtggctctcagtcgcggagagcagaacccggcagcttcaggggctgcctgcgggagggtgttccctgctgtacgtgtgtgttcgtcatgggtgtgtgtgtgtgtgtgttgggggggtgcgtctgtgtgtgtgtctgtgtgtgtgcgcgcgcagtgcctgtctgtgtgccgacttctgtctctctctcacgtctctctctctctctctctctctctctctctctctgtctcccttctcgctctttccgtggccctctctttctgtctctgtccgtctgtgtgcgtgcgcctcgggacacatgtgccctgtgcgccggagggtgggtttcttgcacgtcggcctttcttctggtcagcctctccccgcgtctctgcctgggtcgtgtggccggttggcagtcgtcgtcccggcggttccagtttgggggtctgtgaaggcctgggcaacgtgggcatcggcgtcggacccgcaggggttttcatcccctccccatccggagcagcctctttgctaggctggatccagacgagcgctccccaaccaaggacaacggcctcccaggcgctcatcgtccacccgcaggagggtgcccgcagagcttcaagaaggtggttgtcacgcctgtcgccctctgccctcatcgagaaatgtagccacagctcgacgcagggacggagaaggaagccggcaaggggatggggcaagcatgtctgtctctcaaaggctggccttcctggccgagtcacccgtttgacactcctccccggatgccggtggtggtggcatggcccccccgtatcctgcctgggctctggcctctgctctgacctccctcttgctgtgtctgccccgcctctgagaagcctggcggcttcttagtgtggctcagtgtcttccacaaagaagacttccccgtccatcagggagaaacctcgtggcggtccgcgtcatgattgtttccctctccacacctctttctggatgattgggcagctgtggtgatcctggagctctgggcttccatacctgtgtgggacagggaagctctctgggtctccatggcccaagtgatggctgcacgctcggtccaggaagaggcggaggcaagcccaccgctcctgacattggccttctaggaaaggcggtgttgcatcccacctgcacttcctctctgattcttgagggccaaccgcttcctccgctcctggggaaagtgccttctagcaccgaatcttttggctgccacggatgtcagggagccaacgggactgggttttggctgggtgcaggggaggttgcgtcaggggtacctagccggcggcgggctgggggtggggtgtactttgtccaaacctctcggctcctctggcgggcctccctgaacgtggcgtggactcgcgcacaggccctgtctcgcaggttttcaggtgcgcttggcttttcctccgctttgtggggcaggtctccagtggccccccgggcgcacgcctggacatcactgtccgtctcgtcgtcgccccctacggcctcaaagacacacgctgcctgcatgtgctcttgggggacgacagtgccacatgtggacacactggctccagctcggactcgcctctgtctctctttgcccgtgtcgccggaagccgcctcgggttgccggagccctcgggccttggagatgaaggcaggcccctgctcctgccaggaaggagggaggcagtgggctcatgggtcggtgcctttgcagccgacagcacgccttgcggccctggggatcttcctgtgccccggcgagaccctttccgcctcactgcattggaaccccattcccgatcacccgctgggatccatcatcggaccccaagaggagtccgcgcagcccagccggcaccccgaagctcctccttcagtgggaaccgaagcagaagagcgatcaaggaggtcctcaccacaggactcctatgggtccgaccctgggtctcccgcaggcccctctggcagtcctcttcccacccgccgcctcgggctgcgccttcgccgccgccgccgcaacctccagcaccgccgccccaggccccgcagccgccgcgtcgccgccattttttaaagggtccgcagcctgactctgcggagtaagggggggtggagcgggggagtcggcctcgccagcgcgcatgcgcgaggcccgagccgccgcttgggtcacagtgaaagccaccgttgcccggggatgggtccctgacacttggggaagtaggagccctgtgtgatcgtgcgtctgagtctgggctgagaccagtcctggccagggcagttaccaggacggtctccggaggccgggattcgcggagggtccagcagcaggaagaaaccccaggaggaagaaacctcagacagatcgccggcgaggcagcgcgggatcccagcctcaggcgtgcgcggacggtgtgcgggtgagtctccccaaaagtggagcccttgtgatgacgagcacaggtccgcctgcgtgcccgtgggctgctctctcaccggtggctctcagtcgcggagagcagaacccggcagcttcaggggctgcctgcgggagggtgttccctgctgtacgtgtgtgttcgtcatgggtgtgtgtgtgtgtgtgttggggggggtgcgtctgtgtgtgtgtctgtgtgtgtgcgcgcgcagtgcctgtctgtgtgccgacttctgtctctctctcacgtctctctctctctctctctctctctctgtctcccttctcgctctttccgtggccctctctttctgtctctgtccgtctgtgtgtgcgtgcgcctcgggacacatgtgccctgtgcgccggagggtgggtttcttgcacgtcggcctttcttctggtcagcctctccccgcgtctctgcctgggtcgtgtggccggttggcagtcgtcgtcccggcggttccagtttgggggtctgtgaaggcctgggcaacgtgggcatcggcgtcggacccgcaggggttttcatcccctccccatccggagcagcctctttgctaggctggatccagacgagcgctccccaaccaaggacaacggcctcccaggcgctcatcgtccacccgcaggagggtgcccgcagagcttcaagaaggtggttgtcacgcctgtcgccctctgccctcatcgagaaatgtagccacagctcgacgcagggacggagaaggaagccggcaaggggatggggcaagcatgtctgtctctcaaaggctggccttcctggccgagtcacccgtttgacactcctccccggatgccggtggtggtggcatggcccccccgtatcctgcctgggctctggcctctgctctgacctccctcttgctgtgtctgccccgcctctgagaagcctggcggcttcttagtgtggctcagtgtcttccacaaagaagacttccccgtccatcagggagaaacctcgtggcggtccgcgtcatgattgtttccctctccacacctctttctggatgattgggcagctgtggtgatcctggagctctgggcttccatacctgtgtgggacagggaagctctctgggtctccatggcccaagtgatggctgcacgctcggtccaggaagaggcggaggcaagcccaccgctcctgacattggccttctaggaaaggcggtgttgcatcccacctgcacttcctctctgattcttgagggccaaccgcttcctccgctcctggggaaagtgccttctagcaccgaatcttttggctgccacggatgtcagggagccaacgggactgggttttggctgggtgcaggggaggttgcgtcaggggtacctagccggcggcgggctgggggtggggtgtactttgtccaaacctctcggctcctctggcgggcctccctgaacgtggcgtggactcgcgcacaggccctgtctcgcaggttttcaggtgcgcttggcttttcctccgctttgtggggcaggtctccagtggccccccgggcgcacgcctggacatcactgtccgtctcgtcgtcgccccctacggcctcaaagacacacgctgcctgcatgtgctcttgggggacgacagtgccacatgtggacacgctggctccagctcggactcgcctctgtctctctttgcccgtgtcgccggaagccgcctcgggttgccggagccctcgggccttggagatgaaggcaggcccctgctcctgccaggaaggagggaggcagtgggctcatgggtcggtgcctttgcagccgacagcacgccttgcggccctggggatcttcctgtgccccggcgagaccctttccgcctcactgcattggaaccccattcccgatcacccgctgggatccatcatcggaccccaagaggagtccgcgcagcccagccggcaccccgaagctcctccttcagtgggaaccgaagcagaagagcgatcaaggaggtcctcaccacaggactcctatgggtccgaccctgggtctcccgcaggcccctctggcagtcctcttcccacccgccgcctcgggctgcgccttcgccgccgccgccgcaacctccagcaccgccgccccaggccccgcagccgccgcgtcgccgccattttttaaagggtccgcagcctgactctgcggagtaacggggggtggagcgggggagtcggcctcgccagcgcgcatgcgcgaggcccgagccgccgcttgggtcacagtgaaagccaccgttgcccggggatgggtccctgacacttggggaagtaggagccctgtgtgatcgtgcgtctgagtctgggctgagaccagtcctggccagggcagttaccaggacggtctccggaggccgggattcgcggagggtccagcagcaggaagaaaccccaggaggaagaaacctcagacagatcgccggcgaggcagcgcgggatcccagcctcaggcgtgcgcggacggtgtgcgggtgagtctccccaaaagtggagcccttgtgatgacgagcacaggtccgcctgcgtgcccgtgggctgctctctcaccggtggctctcagtcgcggagagcagaacccggcagcttcaggggctgcctgcgggagggtgttccctgctgtacgtgtgtgttcgtcatgggtgtgtgtgtgtgtgtgttggggggggtgcgtctgtgtgtgtgtctgtgtgtgtgcgcgcgcagtgcctgtctgtgtgccgacttctgtctctctctcacgtctctctctctctctctctctctctctctctctctctctgtctcccttctcgctctttccgtggccctctctttctgtctctgtccgtctgtgtgtgcgtgcgcctcgggacacatgtgccctgtgcgccggagggtgggtttcttgcacgtcggcctttcttctggtcagcctctccccgcgtctctgcctgggtcgtgtggccggttggcagtcgtcgtcccggcggttccagtttgggggtctgtgaaggcctgggcaacgtgggcatcggcgtcggacccgcaggggttttcatcccctccccatccggagcagcctctttgctaggctggatccagacgagcgctccccaaccaaggacaacggcctcccaggcgctcatcgtccacccgcaggagggtgcccgcagagcttcaagaaggtggttgtcacgcctgtcgccctctgccctcatcgagaaatgtagccacagctcgacgcagggacggagaaggaagccggcaaggggatggggcaagcatgtctgtctctcaaaggctggccttcctggccgagtcacccgtttgacactcctccccggatgccggtggtggtggcatggcccccccgtatcctgcctgggctctggcctctgctctgacctccctcttgctgtgtctgccccgcctctgagaagcctggcggcttcttagtgtggctcagtgtcttccacaaagaagacttccccgtccatcagggagaaacctcgtggcggtccgcgtcatgattgtttccctctccacacctctttctggatgattgggcagctgtggtgatcctggagctctgggcttccatacctgtgtgggacagggaagctctctgggtctccatggcccaagtgatggctgcacgctcggtccaggaagaggcggaggcaagcccaccgctcctgacattggccttctaggaaaggcggtgttgcatcccacctgcacttcctctctgattcttgagggccaaccgcttcctccgctcctggggaaagtgccttctagcaccgaatcttttggctgccacggatgtcagggagccaacgggactgggttttggctgggtgcaggggaggttgcgtcaggggtacctagccggcggcgggctgggggtggggtgtactttgtccaaacctctcggctcctctggcgggcctccctgaacgtggcgtggactcgcgcacaggccctgtctcgcaggttttcaggtgcgcttggcttttcctccgctttgtggggcaggtctccagtggccccccgggcgcacgcctggacatcactgtccgtctcgtcgtcgccccctacggcctcaaagacacacgctgcctgcatgtgctcttgggggacgacagtgccacatgtggacacgctggctccagctcggactcgcctctgtctctctttgcccgtgtcgccggaagccgcctcgggttgccggagccctcgggccttggagatgaaggcaggcccctgctcctgccaggaaggagggaggcagtgggctcatgggtcggtgcctttgcagccgacagcacgccttgcggccctggggatcttcctgtgccccggcgagaccctttccgcctcactgcattggaaccccattcccgatcacccgctgggatccatcatcggaccccaagaggagtccgcgcagcccagccggcaccccgaagctcctccttcagtgggaaccgaagcagaagagcgatcaaggaggtcctcaccacaggactcctatgggtccgaccctgggtctcccgcaggcccctctggcagtcctcttcccacccgccgcctcgggctgcgccttcgccgccgccgccgcaacctccagcaccgccgccccaggccccgcagccgccgcgtcgccgccattttttaaagggtccgcagcctgactctgcggagtaagggggggtggagcgggggagtcggcctcgccagcgcgcatgcgcgaggcccgagccgccgcttgggtcacagtgaaagccaccgttgcccggggatgggtccctgacacttggggaagtaggagccctgtgtgatcgtgcgtctgagtctgggctgagaccagtcctggccagggcagttaccaggacggtctccggaggccgggattcgcggagggtccagcagcaggaagaaaccccaggaggaagaaacctcagacagatcgccggcgaggcagcgcgggatcccagcctcaggcgtgcgcggacggtgtgcgggtgagtctccccaaaagtggagcccttgtgatgacgagcacaggtccgcctgcgtgcccgtgggctgctctctcaccggtggctctcagtcgcggagagcagaacccggcagcttcaggggctgcctgcgggagggtgttccctgctgtacgtgtgtgttcgtcatgggtgtgtgtgtgtgtgtgttggggggggtgcgtctgtgtgtgtgtctgtgtgtgtgcgcgcgcagtgcctgtctgtgtgccgacttctgtctctctctcacgtctctctctctctctctctctctctctctctctctctctgtctcccttctcgctctttccgtggccctctctttctgtctctgtccgtctgtgtgtgcgtgcgcctcgggacacatgtgccctgtgcgccggagggtgggtttcttgcacgtcggcctttcttctggtcagcctctccccgcgtctctgcctgggtcgtgtggccggttggcagtcgtcgtcccggcggttccagtttgggggtctgtgaaggcctgggcaacgtgggcatcggcgtcggacccgcaggggttttcatcccctccccatccggagcagcctctttgctaggctggatccagacgagcgctccccaaccaaggacaacggcctcccaggcgctcatcgtccacccgcaggagggtgcccgcagagcttcaagaaggtggttgtcacgcctgtcgccctctgccctcatcgagaaatgtagccacagctcgacgcagggacggagaaggaagccggcaaggggatggggcaagcatgtctgtctctcaaaggctggccttcctggccgagtcacccgtttgacactcctccccggatgccggtggtggtggcatggcccccccgtatcctgcctgggctctggcctctgctctgacctccctcttgctgtgtctgccccgtctctgagaagcctggcggcttcttagtgtggctcagtgtcttccacaaagaagacttccccgtccatcagggagaaacctcgtggcggtccgcgtcatgattgtttccctctccacacctctttctggatgattgggcagctgtggtgatcctggagctctgggcttccatacctgtgtgggacagggaagctctctcggtctccatggcccaagtgatggctgcacgctcggtccaggaagaggcggaggcaagcccaccgctcctgacattggccttctaggaaaggcggtgttgcatcccacctgcacttcctctctgattcttgagggccaaccgcttcctccgctcctggggaaagtgccttctagcaccgaatcttttggctgccacggatgtcagggagccaacgggactgggttttggctgggtgcaggggaggttgcgtcaggggtacctagccggcggcgggctgggggtggggtgtactttgtccaaacctctcggctcctctggcgggcctccctgaacgtggcgtggactcgcgcacaggccctgtctcgcaggttttcaggtgcgcttggcttttcctccgctttgtggggcaggtctccagtggccccccgggcgcacgcctggacatcactgtccgtctcgtcgtcgccccctacggcctcaaagacacacgctgcctgcatgtgctcttgggggacgacagtgccacatgtggacacactggctccagctcggactcgcctctgtctctctttgcccgtgtcgccggaagccgcctcgggttgccggagccctcgggccttggagatgaaggcaggcccctgctcctgccaggaaggagggaggcagtgggctcatgggtcggtgcctttgcagccgacagcacgccttgcggccctggggatcttcctgtgccccggcgagaccctttccgcctcactgcattggaaccccattcccgatcacccgctgggatccatcatcggaccccaagaggagtccgcgcagcccagccggcaccccgaagctcctccttcagtgggaaccgaagcagaagagcgatcaaggaggtcctcaccacaggactcctatgggtccgaccctgggtctcccgcaggcccctctggcagtcctcttcccacccgccgcctcgggctgcgccttcgccgccgccgccgcaacctccagcaccgccgccccaggccccgcagccgccgcgtcgccgccattttttaaagggtccgcagcctgactctgcggagtaagggggggtggagcgggggagtcggcctcgccagcgcgcatgcgcgaggcccgagccgccgcttgggtcacagtgaaagccaccgttgcccggggatgggtccctgacacttggggaagtaggagccctgtgtgatcgtgcgtctgagtctgggctgagaccagtcctggccagggcagttaccaggacggtctccggaggccgggattcgcggagggtccagcagcaggaagaaaccccaggaggaagaaacctcagacagatcgccggcgaggcagcgcgggatcccagcctcaggcgtgcgcggacggtgtgcgggtgagtctccccaaaagtggagcccttgtgatgacgagcacaggtccgcctgcgtgcccgtgggctgctctctcaccggtggctctcagtcgcggagagcagaacccggcagcttcaggggctgcctgcgggagggtgttccctgctgtacgtgtgtgttcgtcatgggtgtgtgtgtgtgtgtgttgggggggtgcgtctgtgtgtgtgtctgtgtgtgtgcgcgcgcagtgcctgtctgtgtgccgacttctgtctctctctcacgtctctctctctctctctctctctctctctctctctctgtctcccttctcgctctttccgtggccctctctttctgtctctgtccgtctgtgtgtgcgtgcgcctcgggacacatgtgccctgtgcgccggagggtgggtttcttgcacgtcggcctttcttctggtcagcctctccccgcgtctctgcctgggtcgtgtggccggttggcagtcgtcgtcccggcggttccagtttgggggtctgtgaaggcctgggcaacgtgggcatcggcgtcggacccgcaggggttttcatcccctccccatccggagcagcctctttgctaggctggatccagacgagcgctccccaaccaaggacaacggcctcccaggcgctcatcgtccacccgcaggagggtgcccgcagagcttcaagaaggtggttgtcacgcctgtcgccctctgccctcatcgagaaatgtagccacagctcgacgcagggacggagaaggaagccggcaaggggatggggcaagcatgtctgtctctcaaaggctggccttcctggccgagtcacccgtttgacactcctccccggatgccggtggtggtggcatggcccccccgtatcctgcctgggctctggcctctgctctgacctccctcttgctgtgtctgccccgtctctgagaagcctggcggcttcttagtgtggctcagtgtcttccacaaagaagacttccctgtccatcagggagaaacctcgtggcggtccgcgtcatgattgtttccctctccacacctctttctggatgattgggcagctgtggtgatcctggagctctgggcttccatacctgtgtgggacagggaagctctctcggtctccatggcccaagtgatggctgcacgctcggtccaggaagaggcggaggcaagcccaccgctcctgacattggccttctaggaaaggcggtgttgcatcccacctgcacttcctctctgattcttgagggccaaccgcttcctccgctcctggggaaagtgccttctagcaccgaatcttttggctgccacggatgtcagggagccaacgggactgggttttggctgggtgcaggggaggttgcgtcaggggtacctagccggcggcgggctgggggtggggtgtactttgtccaaacctctcggctcctctggcgggcctccctgaacgtggcgtggactcgcgcacaggccctgtctcgcaggttttcaggtgcgcttggcttttcctccgctttgtggggcaggtctccagtggccccccgggcgcacgcctggacatcactgtccgtctcgtcgtcgccccctacggcctcaaagacacacgctgcctgcatgtgctcttgggggacgacagtgccacatgtggacacactggctccagctcggactcgcctctgtctctctttgcccgtgtcgccggaagccgcctcgggttgccggagccctcgggccttggagatgaaggcaggcccctgctcctgccaggaaggagggaggcagtgggctcatgggtcggtgcctttgcagccgacagcacgccttgcggccctggggatcttcctgtgccccggcgagaccctttccgcctcactgcattggaaccccattcccgatcacccgctgggatccatcatcggaccccaagaggagtccgcgcagcccagccggcaccccgaagctcctccttcagtgggaaccgaagcagaagagcgatcaaggaggtcctcaccacaggactcatgggtccgaccatgggtctcccgcaggcccctctggcagtcctctccccacccgccgcctcgggctgcgccttcgccgccgccgccgcaacctccagcaccgccgccccaggccccgcagccgccgcgtcgccgccattttttaaagggtccgcagcctgactctgcggagtaagggggggtggagcgggggagtcggcctcgccagcgcgcatgcgcgaggcccgagccgccgcttgggtcacagtgaaagccaccgttgcccggggatgggtccctgacacttggggaagtaggagccctgtgtgatcgtgcgtctgagtctgggctgagaccagtcctggccagggcagttaccaggacggtctccggaggccgggattcgcggagggtccagcagcaggaagaaaccccaggaggaagaaacctcagacagatcgccggcgaggcagcgcgggatcccagcctcaggcgtgcgcggacggtgtgcgggtgagtctccccaaaagtggagcccttgtgatgacgagcacaggtccgcctgcgtgcccgtgggctgctctctcaccggtggctctcagtcgcggagagcagaacccggcagcttcaggggctgcctgcgggagggtgttccctgctgtacgtgtgtgttcgtcatgggtgtgtgtgtgtgtgtgttggggggggtgcgtctgtgtgtgtgcgcgcgcagtgcctgtctgtgtgccgacttctgtctctctctcacgtctctctctctctctctctctctctctctctctgtctcccttctcgctctttccgtggccctctctttctgtctctgtccgtctgtgtgtgcgtgcgcctcgggacacatgtgccctgtgcgccggagggtgggtttcttgcacgtcggcctttcttctggtcagcctctccccgcgtctctgcctgggtcgtgtggccggttggcagtcgtcgtcccggcggttccagtttgggggtctgtgaaggcctgggcaacgtgggcatcggcgtcggacccgcaggggttttcatcccctccccatccggagcagcctctttgctaggctggatccagacgagcgctccccaaccaaggacaacggcctcccaggcgctcatcgtccacccgcaggagggtgcccgcagagcttcaagaaggtggttgtcacgcctgtcgccctctgccctcatcgagaaatgtagccacagctcgacgcagggacggagaaggaagccggcaaggggatggggcaagcatgtctgtctctcaaaggctggccttcctggccgagtcacccgtttgacactcctccccggatgccggtggtggtggcatggcccccccgtatcctgcctgggctctggcctctgctctgacctccctcttgctgtgtctgccccgtctctgagaagcctggcggcttcttagtgtggctcagtgtcttccacaaagaagacttccccgtccatcagggagaaacctcgtggcggtccgcgtcatgattgtttccctctccacacctctttctggatgattgggcagctgtggtgatcctggagctctgggcttccatacctgtgtgggacagggaagctctctcggtctccatggcccaagtgatggctgcacgctcggtccaggaagaggcggaggcaagcccaccgctcctgacattggccttctaggaaaggcggtgttgcatcccacctgcacttcctctctgattcttgagggccaaccgcttcctccgctcctggggaaagtgccttctagcaccgaatcttttggctgccacggatgtcagggagccaacgggactgggttttggctgggtgcaggggaggttgcgtcaggggtacctagccggcggcgggctgggggtggggtgtactttgtccaaacctctcggctcctctggcgggcctccctgaacgtggcgtggactcgcgcacaggccctgtctcgcaggttttcaggtgcgcttggcttttcctccgctttgtggggcaggtctccagtggccccccgggcgcacgcctggacatcactgtccgtctcgtcgtcgccccctacggcctcaaagacacacgctgcctgcatgtgctcttgggggacgacagtgccacatgtggacacactggctccagctcggactcgcctctgtctctctttgcccgtgtcgccggaagccgcctcgggttgccggagccctcgggccttggagatgaaggcaggcccctgctcctgccaggaaggagggaggcagtgggctcatgggtcggtgcctttgcagccgacagcacgccttgcggccctggggatcttcctgtgccccggcgagaccctttccgcctcactgcattggaaccccattcccgatcacccgctgggatccatcatcggaccccaagaggagtccgcgcagcccagccggcaccccgaagctcctccttcagtgggaaccgaagcagaagagcgatcaaggaggtcctcaccacaggactcatgggtccgaccatgggtctcccgcaggcccctctggcagtcctcttcccacccgccgcctcgggctgcgccttcgccgccgccgccgcaacctccagcaccgccgccccaggccccgcagccgccgcgtcgccgccattttttaaagggtccgcagcctgactctgcggagtaagggggggtggagcgggggagtcggcctcgccagcgcgcatgcgcgaggcccgagccgccgcttgggtcacagtgaaagccaccgttgcccggggatgggtccctgacacttggggaagtaggagccctgtgtgatcgtacgtctgagtctgggctgagaccagtcctggccagggcagttaccaggacggtctccggaggccgggattcgcggagggtccagcagcaggaagaaaccccaggaggaagaaacctcagacagatcgccggcgaggcagcgcgggatcccagcctcaggcgtgcgcggacggtgtgcgggtgagtctccccaaaagtggagcccttgtgatgacgagcacaggtccgcctgcgtgcccgtgggctgctctctcaccggtggctctcagtcgcggagagcagaacccggcagcttcaggggctgcctgcgggagggtgttccctgctgtacgtgtgtgttcgtcatgggtgtgtgtgtgtgtgtgttgggggggtgcgtctgtgtgtgtgtctgtgtgtgtgcgcgcgcagtgcctgtctgtgtgccgacttctgtctctctctcacgtctctctctctctctctctctctctctctctctctgtctcccttctcgctctttccgtggccctctctttctgtctctgtccgtctgtgtgtgcgtgcgcctcgggacacatgtgccctgtgcgccggagggtgggtttcttgcacgtcggcctttcttctggtcagcctctccccgcgtctctgcctgggtcgtgtggccggttggcagtcgtcgtcccggcggttccagtttgggggtctgtgaaggcctgggcaacgtgggcatcggcgtcggacccgcaggggttttcatcccctccccatccggagcagcctctttgctaggctggatccagacgagcgctccccaaccaaggacaacggcctcccaggcgctcatcgtccacccgcaggagggtgcccgcagagcttcaagaaggtggttgtcacgcctgtcgccctctgccctcatcgagaaatgtagccacagctcgacgcagggacggagaaggaagccggcaaggggatggggcaagcatgtctgtctctcaaaggctggccttcctggccgagtcacccgtttgacactcctccccggatgccggtggtggtggcatggcccccccgtatcctgcctgggctctggcctctgctctgacctccctcttgctgtgtctgccccgcctctgagaagcctggcggcttcttagtgtggctcagtgtcttccacaaagaagacttccccgtccatcagggagaaacctcgtggcggtccgcgtcatgattgtttccctctccacacctctttctggatgattgggcagctgtggtgatcctggagctctgggcttccatacctgtgtgggacagggaagctctctcggtctccatggcccaagtgatggctgcacgctcggtccaggaagaggcggaggcaagcccaccgctcctgacattggccttctaggaaaggcggtgttgcatcccacctgcacttcctctctgattcttgagggccaaccgcttcctccgctcctggggaaagtgccttctagcaccgaatcttttggctgccacggatgtcagggagccaacgggactgggttttggccgggtgcaggggaggttgcgtcaggggtacctagccggcggcgggctgggggtggggtgtactttgtccaaacctctcggctcctctggcgggcctccctgaacgtggcgtggactcgcgcacaggccctgtctcgcaggttttcaggtgcgcttggcttttcctccgctttgtggggcaggtctccagtggccccccgggcgcacgcctggacatcactgtccgtctcgtcgtcgccccctacggcctcaaagacacacgctgcctgcatgtgctcttgggggacgacagtgccacatgtggacacgctggctccagctcggactcgcctctgtctctctttgcccgtgtcgccggaagccgcgtcgggatgccggagccctcgggccttggagatgaaggcaggcccctgctcctgccaggaaggagggaggcagtgggctcatgggtcggtgcctttgcagccgacagcacgccttgcggccctggggatcttcctgtgccccggcgagaccctttccgcctcactgcattggaaccccattcccgatcacccgctgggatccatcgtcggaccccaagaggagtccgcgcagcccagccggcaccccgaagctcctccttcagcgggaacggaagcagaagagcgatcaaggaggtcctcaccacaggactcctatgggtccgaccctgggtctcccgcaggcccctctggcagtcctcttcccacccgtcgcctcgggctgcgccgccgccgccgccgccgcaacctccagcaccgccgccccaggccccgcagccgccgcgtcgccgccattttttaaagggtccgcagcctgactctgcggagtaagggggggtggagcggggggagtcggcctcgccagcgcgcaggcgcgaggcccgagccgccgcttgggtcacagtgaaagccaccgttgcccggggatgggtccctgacacttggggaagtaggagccctgtgtgatcgtgcgtctgagtctgggctgagaccagtcctggccagggcagttaccaggacggtctccggaggccgggattcgcggagggtccagcagcaggaagaaaccccaggaggaagaaacctcagacagatcgccggcgaggcagcgcgggatcccagcctctggcgtgcgcggacggtgtgcgggtgagtctccccaaaagtggagcccttgtgatgacgagcacaggtccgcctgtgtgcccgtgggctgctctctcaccggtggctcgtagtcgcgtaaagcagaagtagcagtttcagcggctgacactaagaacaatgcatactggcaaagtgaggtgtctcacatctttaatcccagcagtttgggaggctgaggcggatggatcacttgaggtcaggggatcacaccagcctaaccaacatgatgaaactccgcgtctactaaaaaaaagtaccagacagttagcgcggtgtggtggcatatgcctgtaaatcccagctatttgggaggctgaggcaggagaatcggttgaaccagtgtggccgaggttgcagtgagtgtagattgcaccactgcactctagcctgggtaacaagcacaaaactctgtctcaaaaaaaaaaaaaaaattatcagtgcagagttaggccagattcattttcagagtaggagggaatttcaaattatgggtgaaatgtcccaactgccggaaggtgaaagtgttctgtgatgtaaaatttaggtcacactctataaagcttctccttattctatgtgtgaacagctagtctgtatcttcacctatgcatatttaaaaatcaaccttacgaaggctcttggccaccataatccttcctaccctgtagcaagagcccagcctcagactatgtttccttctgcctccgagtgcaatgccttcccccgagtctccaaggtaccaaaccggtcaggggcagctgagacagctctacttgtacgagtcctccccaagcccttgaaatcacaggcatctctgctgtccctgccctttatccacatcactgaacaattaagcacacacatctgtgtagttttatttaaactgttccatgtgtgtttgtttacaattaacaacatgaatgactgcagtatggatgcagcagaaaggaatgctgagggaggactccagttggaatgagccacttttccaggactaggaatgaactttccccagtaccaacaaggcagcctccagggcaagaaatggtaacagaatccatcctgttgacagtcaagatggaattacagagaattctcacctcttttttgactctcaggtggaaacccccttcccatggggtgaagcgcagtctgctccagagacccactgttagggtcggggatgtcacagaaattaacagggcagccaattcccatccagaggggcccaggatgaccccgaaccctctagctcagccccaagctcgggccagggagtgaagcctttgtccccaagcaacagagtgagggtctgtctctaacccggtgggctccagtgaaaggaaaatggcctggaggtgcccacaggagggcgccctagttctgagacaggtctacggctcccagactgcgtccccatgagtaacagagggacacgcagaggggcatactgagtgcctataggggactcacagactgcagatgcacgctgcggatccagaagccggtcaggtaatgaggtgcagaggtgtggggaagacctgggtgcttccctgggtgccaaccagcctaacccgccggggccaccaaacagaagtgcttctgacattaacgcgacacacagaaggtgtgtagggtgggtagtggaagtgaccgcagaggcctctggggattgtagttttggagctagagaggcgggcaagcagttggcttcgcccacacggtgtgcctctcacatctgcacagcgcacacaaccaagcttaggagccgactgttaagatgccccagtgacacggacaagtttctcctctgcaacccaatgagagctgctgaccacgagagcatcgcgggaccgccaaaggattctggaaaatgtggtcccgggtggccagtgtgcgctgaccttcacctgaaggtgagctgagctcaccatgcaagtctccaccctggggtgcccttccccaagcagatgccaggttggggcagaagcagttcagggagaagcgatgcgctcctgggactgccggtttggggggcaacatcggccctgtgtcccctagagtaggagggtgtaccaggatggggaaccccaaggccgttttcagggagaacaagattggcttgaggcaaactcccggaatggagatggggagagtctggtcgcatttccccaggagtttaggggatgaaggctggacttgggtgaacagcaaaagatcccctggtgatagtggtggtgaggatcagaggcttgagccagaaattcccgaggtgtttgtttgttttgttttttttgagacagagtcttgatctgtctcccaggatgtagtgcaatggcatgctcttggctcattgcaacctccgcctcccaggttcaagcgattctcctgcctcagcctcccaagtagctgagattataggcacctgccactgtgcccacctaaattttttttgtttttttgtatttttagtagagacgatgtttcaccacattgcccagcctggtctcgaactcctgacctcaagtgatccacctgcctcggcctcccaaagtgctgggattacaggcatgagcccccacacccagctcatttttatcttttaacttaaaggtttttatttttctctatttttactcttacaggtacggcttgaaggaaacttctggagggtggggtggtgttgaagagaaggcacaattgtcaccattttgttcaacatgggcgttttctttgtgcattgatttgcatttttaaaggtattccattaaaaatatgtttatctattttaatgttttttttggtgcccctttaaattctctatccacagtcctgagccttaatacgaagtgagggcctggcctctgggcatcaagcagccagaaagtcccttaggagctttctctgaattgttgaattgtgactgatcttttcctttcctgacttccttaatatccacaatttcctcgtaaccatccccccaaagccacacccacaaggcacctccaagacctatcatgaagcagatattcaaagattatttgtaaatcttcacaccccaccccttccagaatgtcttccaacatcccttcgcctggagaaataaaacacaaggtttgcatgttgagtatcagcctctcccattgggtgggtgtttaggaaaaagaatcagccaagagccctattccagcccaggtaaatgactttgccaaagatttaatatccacaaatgtacaatgctcactgggaaccaaagtcaggcatggggctgggctttaaggagcacaaacaaaaaggagggactagaaaacttcagaaaggtattggtgggggatgttgcggggggacaggggacagcgaggatgtgggatcccgagatcatccaaatccctatgtgtagacatatgtgtataaaggcctttaagagactcaggctgatggggtatctgtaataaatcaaacataatataacagcacgtcaagtgataaggggactctggaaaaacaagcagcaaaaggagcagtatcaaactccacagaaattcacaaacatcaagacaccaagaaagctgcattcatttaaatcaaggtgacaggctgggctctgtagctccagcctgtaatcctagcactttgggaggccaaggtgggcagatcatttgaggttcaagaccagcctggccattatggtgaaagctcctctctactaaaaatacaaaaattagctgggcatgttggtgggtgcctgtaatcccagctaaagaggctgaggcaggagaatcactctgaacctgggaggcagaggttgtagtgagcagagatcacgccattgcactccggcctcggggacagaaccaaactccatctcaagtaaatcaataaatcaaaggtgacagttactgagtgatgcgggccaggtacaatgatataccttcatctggattaccctcgtgaatctgaatcacttgtgtgatatctgtgctttaacgagtcctatttcccatactcttagctggcttgagatgtgaaaatccacctaaattataaacagagtgaaaaaaaaaaaaaaaaaactagtgatgtccttccagggaacatgtctagttaaaattaacatagataaaaatcggcaaaaagatattttaaaaaatcttttgaaattaaaagccatataaaccactgtgtcaatgatgaattaaaagaagaaactgacctgcaaaccaggaaatacatggaaagaagcaatagtgaaaatgcttcagatctaaacctgtggaatgaggctacctcagtgtccaaaaatatcatcacttaaatatagtgccaaggggtggggtgtggtgactcacccctgtaatcccagtattttgggaggccaaggtgggcggatcacttgaggtcaagagttcgagaccaacctggctgacatggtgaaatgccgtctctactaaaaatacaaaaattagctgggtgtggtggcaggcacccataatcccagctactcaggaggctgaggaaagagaactgcttgagcccgggaaccggaggttgcagtgagctgagatggcaccactgtactacagcctgggtgacagagcgagactctgtctcaaaaacaaaaaatttccaatgaataaactacctagcaagacttatagaatgagactaaaaccatggctggaggaaaacttttagcctgaaagtagcctatgacttagaaattaaggcaaaaaactaaggagtaagaagttacccttcaggttagaaaaccaacagcataacaggaaatgagacagggaagaaataatcagatggggctgagatgggggcttatggggatgaaggaggcaggaagagcatgtgaagtttgtgcataaagtcactccctaaggacagtccctgggaggaaggtgggtgcacaatgatcgagctagatgtagaaggtctagaaggcaatcctggagggtacattcaggggttgacagcagataagaaaacaggagggaaagtcaagcgtggagcctttcctgtccccagcatggaagacagcaggagctggtgagtgaaagtgataaacagccttctcatcacaaaaaaagtcaagtacttgaggtaacggataggttaatttgattctcattccacactgtattgaaaaatcacaacatcattttataccccataaatatatacaatttagaagatacataaaaatcagcaaaaaaaaataaactattctttgaaatatttttcaaacatgcaatttatggggtacaacctaattcgtctatatatatatatatatatatgttttttaaacagggagtcaataaacacagcaaacagccccttgggagggagataaggaaaatggccataatgtgcccttagaaagacacagcatttaaatccatgcatgtgagaactccagggttcaaggtaagaccaggtcagtgaagaacagccggcttatcacctatagccacaggatggcaccaacacccactgctccagcctgagctggccagagagagaaaacattcaagaaaagctgggacttcccagaaggcctgagacctgcaggtcccacactgaagtccagtgagggaggaaggtatgatatgaggtgaaaaaaataccatagaggtgtagctgaaatgaaacatttaatagttattaaatagtcattgtacttcaggtaaaagtaggtaaaatgacagaaaacgagacgaatgagccagacaccacagatatgtaatgatggacaatgacctgatgtggagtgttcacccacacatgcagactttatatgttcacataaacatttatctgcatgcatcaccccatagagatgtttacacaaactgcactgacactgtgaagtcaacgaggagataaagtaaaaatcaaatagttatggagagggttgatctgtttagtgggaaacccttcagaacacgcacacagcatctcccctcccttctgaataccatccatagcctgcagtagatggcaaatcacagcctgggccacccttcccagaatgtcccaaacatggacatgcagaccacagaactcaccagatactcaagatgggtggtgccgggctctgaaagacatgcttcaagtaagagggactagaaaactctgccagggagcaagagggatcggggattccaggaggatccaggggcctgtgcaaagagcaagcagtgagcagacgtgtgtgtcagtgattcggtggcatgaactcaacaccatctaatacagcagctcacatttctgtgtgcatcagactcacctggggacttgttaaatacagattgttgggtctcactcctagagtttcttcttcagtattctagggagcagcctgtgaatctgtatttccagcatgattttcaggtgctattgatactgttggtccaaggaccacactatgatctaatttagcaccaggttaggggaggaactaaggagcaaagaagcaacagaagaagggacctgaagcctgtaggtgcttctctgtaaactcctcaaacataaaagccttcaagacattcaaagagcatttacagcatcatgtctacaaatacaaggcaccacgcagggagtgctccatcaagtagaagagcccactgagtgtccctctcttagtccgtttgtgttgctataacagaataccacagactgggtgatttataagcaagagttcacttggtttacggttctgaacactgggaaagtgaggggcctgcatctggtgaaggtctcactgtgccgtcctatggtggaaggtggaagggcaagagagtgaccacatgtgagaggggggagggggaaagagaaagggaaggaagccaacctcatccttttatcaggaaccccctcccaagataactaacccactctagcttcatccattcatgagggcagagccttcatgacctaatcacctcttaaaggttccactggtcaacactgttgcattaggggttgagtttccaacacatgaactttggggaacacattcaaaccacagcagtcctcatgtaaaccttccagaaaacctgtgtgcctggcactctggaatccctcttttccaccccttcccactgcaactctaacatcgtgtcccctcatcattttccattcgagcataggaaagaacacaatcactacacccatttttgatgaacctttcctacattaaaataattctatcacttagaaatttgcaaaaataaattttcatttttgatatgagcgaatatgaattttttttttttttttttttttttgagaaggagtcttgctctgtggcccaggctggaatgaagtggcaagatctcagctcactgcaatctctgcccccggggtcatgcgattctcctgcctcagccttccaagtagctgggattacaggcgtgcaacaccacacccggctaattttgtatttttaatagagatggggttttcccttgttggccaggatggtctcgaacccctgacctcaggtgatgcgcccgccttggactctcaaagtgctgggattacaggcatgagccactatgcctggccctgaatatgaaattctgtattagtttaatgaaatatctaaaatatatagaaaataattaccaaaaatgttcaatgatgcaaagcaacacatacagtgagatattacatcctaaaatatatagacataaatatgttatttaaaaaatcaagcagaaacataaggggctctatacacaccttttaaaataagctttctggccgggtgcagtggctgatgcctgtaatctcacactttgggaggccgaggcgggcgtatcacctgaggtcaggggttcgagaccagcctggccaacatggtgaaaccccatctctactaaaaatacaaaaattagctgggcatggtggtgggcacctgtaatcccagctactggagaggctgaggtagagagaactgcttgaacccaggaggcagaggttgcaggggtccaagatgtgccactgtactccagc[140 bp omitted]tggtgaaaccctgtctccatgaaaaatacaaaaaattagccaggtgtggtggcgggcgcctgtagtcacagctactcaggaggctgagggaggagaatggcgtgaacctgggaggtggagcttgcagtgagcagagattgcgccactgcactccagcctgggcaacagagcgagactccatctcaaaaaaataaaattaattataataataaaataaaataagctttctaggttgggcacagtggctcacccctgtaatcccagcactttgggaagctgaggcaggcagatcacttgaggtcaggagttcaagaccagcctagccaaaatggcaaaaaactgtctctactaaaaagacaaaaattagccaggcatggtggtgcacatctgtaatcccgggtactcgggaggctgaggcaggagaatcacttgaatctggaaggcagaggttgtagtgagctgagattgcaccactgcactccagactggttgccataggaagactgtgtctcaaaaaaaaaaaaaaagatttctagtttaacgctagaattaatttgaaattctgtcaagaaagaggtactcaaaaaacatgaaaactatgtaagtcactaatgtatcaaagaaaacaatcattcttgtattgcaaataaatacccaaccaagacaaaaaggcacgtcacgtgttatgggaaaagactgaaatgagggtgagaggaaaactgtgacccttgaatgtaagacagaaaaaaatcagcgcaggatgttaaggaattggaaataattctccatattaaagaattacaagagacagaaagagaggagagagggacacgatagtcacagactgcaggggtgtggggtagatgggaataaaggaggcagagagagcagtggggatgtacataaaatcaccctccagagctgtgctgtccaataaggcagccacttgccacatgtggctgctgagcacttgaaagatggctagtccaacctgagaaatgctgtaagtggaaaacacattttaaaaaaattctgaatactcagtataaaagaaagaatgggccagtgtggtggctcacatctgtaatcccagcactttggaaggccaaggcgggaggactgcttgagccagaagtttgagactggactgggcaacatagcaagacctcatctcttcagaaaaaaaaaaaattaggccgagtgcagtggctcatgcctgtaatcccaacactttgggaagccaaggtgggtggatcacttcagctctggagttcaagaccagcctggacaacatgccgaaaccctgtcttaacaaaaaaatacaaaaattattcaggcgtggtggcacatgtttttggtcccagctacttgggaggctgaggtgggaggatcatttcagccccggagatcgaggctgcagtgagccgagattgtgccactgcactccagcccggctgacagagtgagaccctgtctttaaaaaaaaaaaaaaactagcgtggcatggtggtgtgtgcctgtagtccgaatactaggaagactgaggcaggaggatctcaagcccaggagtctgaaactgcaatgagctatgctggtgccactgcattccagcctggaccacaaagcaagaccctgtctcaaagaaaagaaagactgtaagctatctcattaataatttttattttgataagatgttgaagtgatattttggataatgctaacattttaggtgaaataaaactaatttcacctgtttctttgtaaccttttttttttttttgagatggagtctccctctgtcgcccaggctggagtgcagtggcgctatctcggctcactgcaagctctgcctaccgggttcacgccattctcctgcctcagcctctcgagtagctgggactacaggcgcctgccaccacgcccagctaattttttgtatttttagtagagagggggtttcaccatgttggccaggatggtctcgatctcctgacctcgtgatccacccacctcagccttccaaagtgctgggattacaggtgtgagccactgcagctggcctctttttcacttttctaaagtgactactagaaaatctaaaatgacgtatgtgtctggcattgtatttctattggaaactactgctgtagagagaaatggtctctagggaggcagaaacatgagaaccacaagaaaggtggatggagggcagtgacagacacatctggtgggtaccttcaggtgcggacagcgggaacccaggagatttgggtgtggacaggcccccatctatgcacagcaggagagtagcatgactgacactaggggtgctgagctgacatacagaactattcagctttataaacatgtgaaaaacaccgctaagtcactgacattccacagaacaaatcataatagaaatgaaaaaacagccaggtgcggtggctcatgcctgtaatcccagcactttgagaggccaaggcggatggatcatgaggtcaggagatcgagaccatcctacctaacacagtgaaaccccgtctctactaaaaatacaaaaacaaaattagccaggcgtggtggcgggagcctgtacttccagctactccaggggctgaggtgggaaaatggcgtgaatctgggaggcagattcttgcagggagccgagatcgccacactacactccagcctggacaacagagcaagactccgtctaaaaaaaaaaaaaaaaaaaaaaaagagagagagaattaatcttgatggaaaatataaaacacttcttcaagaacattaaagaaaattctaaccaccaaaacatttggaattagggtaactgaaatggcagtttaatcctcctgaaggaattttaatttctcactaacagtactttaaagctaggggtagaaaattttttttatagcgtttcacaagcattaaagttaaaaatccaaaatcatgtttttctctgacaggaactcctcctcaaaacagaagaagcctataggattttaacctggaaactactcagggaatctggaatattccttccagggatatctgcagctgaaacctggcagtaatttaaacaaaaccagacaactcttggggtatggttggagcctgaggtctacagatgggtcattttatatgctgaggtctgaacaagatgattttaaccccttaaaatgatggaaacaaaataaaacagaataaattagaagacaacacaggtgagtagtttaaagggcctacttgctgtgttttctctggtcttcaggtctcctcactgtggcgggatccaggcgcagctctagaccaagaaatgggaggattttagagtgactgatgatttctctatcatctgcagttagtaaacattctccacagtttatgcaaaaagtaacaaaaccactgcagatgacaaacactaggtaacacacatactatctcccaaatacctacccacaagctcaacaattttaaactgttaggatcactggctctaatcaccatgacatgaggtcaccaccaaaccatcaagcgctaaacagacagaatgtttccactcctgatccactgtgtggagaagcacagagcttacccactggggccctgcatcagaagagatgcacatgcaccggggtgtgcatttgaacggagcgatcaaaccaccatccccacagctcctctgttcatgggcactgcagtctgtggcctcatgtcctttgggggacacagtgggaaggtaacccacatttcagtgacaccatcaagaaaaacacactgtggcaatttgccctgatttctcatgggccttttctcttttccctttgggttgtatagacttccctactgtccacctgaccactctcatgctgcccaaaaccatagcttaagtcatcagctaggcgtttcttggtgtaactatcgaaaggtgagccttacctgttcaatctctagcgagatttgttcaaaatctggacctagaagaataaataaacaagatttgcctgagtaggtttggctttttccttcttggggaaagcccttaagaaatatcagccccttggccaggcacccacctgtaatcccagcactttgggaggccaaggcgggtgcatcacctgacgtcacaagttcaagaccggcctggccaacatggtgaaaccccgtgtctactaaaaatataaaaaaattagccgggtgtggtggtgggcacctgtaatcccagctactctggaggctgaggcaagagaattgcttgaacccaggagacggaggttgcagtgagccaacacggtgccacagaactccagcctgggaaacagagtgagactctgtttcaaaaaaaaaaaaaaggaaatatcagaccatttgcccaacaactccttgtgcccttcctttaggaacacagtgaaaatccccccggctccacacactatagcgcaggacagacccacagagaacaagacccaagagaacccaccataatacaaactcagggcagggtttccaccatcaaatgttcaagcctgcaatgggttggggagagtggtggttcctgagctccagattttcgtggaggtgggaggtgggcactaggctttgaggagatgttacatctgtgcaaactcacacacaatgaagattacaccaggtcgggtgagatggttcagaaaagacagaaagcagaggaagaggctgaaaatatgggtttctctgtaaactgtgaggacagaaaataccagcaacaccccaggaagtgtttacagccgcatttcttcaattaacagggcaaagttagagcagcaacaaccagacaagggccaggcacttcccctggggcaactgatgtaaacctggaaatcagccaccctcagtgtcaccatttcatgatgaatcaaatatacagagaagttcattgatgggtttggcatcacaaagctaaaaaataaagccagagtcccaggcatatactgaatgctcattgactgaaaatcaacctcactggataagcgcaaaagaactcattttccacatcccttacggtatcctctctggtggctatttgctctgtaaattacctatgacagaagaaaaagaaggaaatgaaaactcaggaaagtaaacactcttctaaactcatgaatagtaaaatatggaaatatccctgagaatctaggagaatatccaaagaaaatgcattataggagggtaaaaaggccatttggcaaagcctacaaaatgagtccaaaatatggttcacaaggaaacttaccttccaatgcatccaaaacagaagaacagcaaaagaagctcctgattcctactgaggtgagaatatcggcacaaacagaaggaaatcaggccaaaaaaaagttacaggccaatttctaaactgctgttagatctaaaacaaatgagaaagtcctgccctaaccaataaaccagagcaaacactatgcatttcaaacactgggggacgtgggcgggggtgagcctgttctgtgcaggacccttctaacatatgggagagtctttgacccctcctcagaataatgccataaactataaaaaaacacaattcatagaatttcaaaggagaccaattacttagaaatgcagctatcaggatgctttaattttttctgacatattaatattgctgtgatagttttaaaaaatagctgaacatttcttgccactcctccctttgggaggcagaatcgatgtcctgtctcccctatcctgggtggatttgctgtgctacctcataaaagacccctcagcatctgccctggagccctgtgcctcctaagaattctgactaccctgaggctgccaggctgtaaggaagtcaaggccatatggaaacactacatataggcactcagtctcagctcaccccctcttccaacatcccaagccaggtatcagatgtgagggaacaagcctccaaatggtcccagaccccagctgttgagtctcctgtgctgaggccagacatcatagacagagacaagtgggctacccttgtgccctgtctgaaatcctgacctgaccatgagaatccacaaacataataaaatgattgtttgagccactaaattttggtgtaattcctgacatactaatagtgtctgtaacagccaccttaacacattaagtaacaatagcaagtagcaagtcatcactgggaagtgttatttggaattgtcttgggaagcagtgacaaccatgaaggctatttggagatgctgtcagatgacataaaaactgctgtggtctcactgttaacaatgtcccatacccacggggtctacagcctatattcaagatggaaggaaacactacattttggttagaggaatgtgatttatatacatataaatcggctgggtgtggtggatcacacctgtaatcccagcactttcggaggccgaggcgggcagatcacccgaggcggggagttccagaccagcttgaccaacatgaagaaaccccatctttactaaaaatacaaaattagctgggtgtggtggcgcatgcctataatcccaactactctcgaggctgaggcaggagaatcgcttgaacctgggaggcggaagttgcagtgagccaagatcgcaccattgcactccagcctgggcaacaagagtgaaactccttctcaaaaaaaaaaaataaataaataaataaataatcaaaaccagtattacagttgataaaggaaatcccaaaacctccttaactggtttctttcataaaagttactctacatacgtgccctaaaaataagacgttggggaaaatactaccacggtcgtacctgagcgagttagagaaaacgccacactttgagacacatgaagaatccgtttatttagctggtggccaagagacggctaacgctcgaaattctctcggcctgaagaaggggctagatttgcttttatactttggtttagaaaggagagggggggtctagttaaaacaattttacagaaataaagtaggcaaaaaagttaaaaggataaatggttacaggaacgttaatagttccaggtgcaggggctttaagattattacaaggtgatagacgcggggcttttgggtgtaatcaattggacgaattcctgggaactgcggatatagcttgccacagtatcttatcagttaattgcattcttggatgtgctgggagtcagcttgcacaagttaagtccttgaggaagcggctgccagtgaaagagccaagatggagtccatctggcgctcttagctaagggagagtcaattcaggtggaaacaaggctgagtgattaaaggaaagggagagtctaaaaacagggttagtaaaaaccaggttggacactacattccccacttgtgtttttggggaatcaaatcattgattcctcagttataacaagggggttatattgagtcttaagatacataagtttgacagaagctatgcattgttttacaaaattaagaaaaagaattaatctaatggcttcacccaacttaggtgcagttttaaggggcctgacccagccctggggacccatgtttctagttgggctccgttggcctttttgatgcgggagtgatgaatccacgcaggaatgccatccaccttcagagccgttggcatcgtgatgacggtgtgaggtctcttccaagcaggagggagtccttctctctggaactttttaacaaacaacaggtcacctggcgggaatgaatggcagggccctgtctgttcaggaattggattgggatgggttcctcgaacaagtggcaggatgatatcttgtacctgttggggagactgtaggtactgtaataaattagtttgtgatatttttgccaattgggcatctcttagcttaggcaagataggcagcgccctcccatacatgatttcaaaaggtaagaacccagcccagtaaggggtgcaccttactctaagtagggctaaaggaaggagacttacacaatttacaccggtttctaagattaattttgtaagagtgttttttagggtgcagttcatgcgttctacttgcccagagctctggggtcgataggcacaatggagcttccattgaatgtttaacgccttactgactgactaaactatagacaaggcgaaggccggtccattatcagaccctatggcaacaggcagcccatgtcgagggatgatttcattgagtaaaaacttaactaccatattgacagtttcgtttttggtagcaaatgcttcagtccatccagagaaggtgtctaccagtactagaaggtatttgtacccagcccggtgtggttttacttctgtaaagtcaatttcccacttttctcctggtgagttttcttggagacggtggcctgggctgggtttaggaccttttttggcatttacctgggcgcaggttgtgcaccggagagctgcttgatctgttaggctttgaagatgggggatcttaaaacggctccggaggagctgaggtagctttgctcctcctaaatgggtggtagactgtaggtgactgattaaagttttcccaagagttcggggtatgaagattctagagtcaggaagaatccaccaaccttcctgatttttattggctctgagttctgaggccagttttcttcttctgttgagtatgcgggattgtcaggcagatctggctgtggaaaggagactgtgggcagcaagtttagaggcgtgactgaaagtcacactgcatcttgagctgctgaatcagctttctggttaccacgggcaacagccgtgttttccttttgatgtcctttacagtggattacagccacctgctgaggtgagtagcccacgctcctggtagatggctccacgtacatgcacagtagcaaaggcgtacctgctgtcagtgttaacgttaatatccttaccccatcggagagcctgagtgagggcgatcaattcagccttttgtgctgaggtgtttgctggtaaagcctgagcccacaacacatctgtctccatggtaacagctgcaccggcctttcgtagtcccttctcgaggaagctgctactgtctgtgaacacggtggcatccacctttcctaggggcacattttgaagatcaggtcggccagtttcagtagtttccaacagttcctgacagtcatgaacaggaatagtggagtttgagtcaggaagtagtgtagctggatttaaacaccatgtgggaggggaagtcaaatgaggctgatctaacagtaaactctgatactccaggatgctttatcagtggcttttttcagctgcctgagctgcttgtttttgtttttcaacctcttgactgtcaaaaaccttttaggctatctctaaaagctgactggtattcattccagcaaaatccctctagtttttggagtttccttttactatctggggctgcctgagccacaaatgccaaattaagagcatggctattttcgggggctgccaggtcaaaaggggtgtaaatccgataagcctcctggaggtgctctaaaaacactcctggtgactcatcatgcccctggacgacttcagtcgccttagacaagtttataggtttctgagcagctccctgaatacccacgaggagataccggtggaaatcgtcaaaagttctccctccacttgagaaatttgggtcccaattaggtcccaattgggtctctaatcactattcctctagcttcctcctccggcctattggttgatgtgaggttgtactttttggcctctctttggatactttccctctcttcagaggtgaaaagggtcaaaaggagctgttgacagtcatcccaggtgggccaatgtgtccagagtacagactccatcagtgaggtcaaagcctggggcttttcagagaagggaggattatgggttttccaattatacaagtcagaagtagaaagaagggacataaaccaggaagggggtggagcactcatcacccagagggacttgtgcctctctcagtggtagtagaggggctacttcctcccaccacggttgcaaccaagaggcaatgggtgatgagcctacaggggacatagccgaggagacatgggatgaccctaagggagtaggctggttttaaggcggtgggactgggtgagggagactctcctcttcttcagagagaggcagtacagggcgagctaaaccggctgagggtcgaggcgaaaacacggtctggctcaggaggaccttggaggtaaaattatgaatggtgcatgagtggagccatggaaggggtgctcctgaccaaactcagccattgatcaatgtagggaaactgatcagggaggccgggagtttcagtaacaacccgccacacagcttgaacaattgtgaggttcagtgacccttcaaggggccactcaactccaaactttggccattctactttgcagagtgtccagagcttgccttttttaaggcggactccataatcctctgagaaaccgagagaaaaattctgcagcatatactggagagggctccaacccttacaaggctgggaggaagtgtttcccctttttttttttttttgaaggcaatttaataagatttgaacatagatatcaaacccagcacagacagagaaactcactccctggggggctggagtatcgaaagaacagaatcaacatgaccagaaagagcagaaaaaccacaacagctaaataccacttgccacatcactgtagctttaagattgagggaggaggactagaggccagcccgagatctcctgggtcagttggatctaggtgttctctctcttcttctagatctgtaccctaaataccttttgtgtctccatgactcaaaggcaaatagctcaaacccagctttttcttttaagggttcaaggagtgagagcagagccaagtcctggagacgctgaacttgctgtcgcactggaaaacgagatgtgtggggtagggggcagggaggaggaaaaggaccacttggatcgtttttaagatgggagagtagccacagaggaacagagtaagaatctaaacgaagtaaagcagtacgagggtaggtttccctacacagtgtgctatttaagggcacaggaaaagttacagaatgaccaaagaggtgagcaaggaaatctgcagggtggctgttttgaacccaccaccagtttagtttagaggaggtccaatcaacctggatgtggggtatgacaatctaaatacaaccatcatggtgccagaaatcccaatcaggcgaatgtttttttacactcattcccgtaacaacacctgacttgcttctggcagaaaagacaggactgtggtggccagcctaaatgattgatgagaaatttaacctcctgtgacaaaaaatcagcactaaggaccttgcagaagttcttacccagacgtcttgggcaatatcgacgtcctgacatgcaaaaccttgacaaccactaaacaagacaatagacaccgaacagaacaataaacataaaacaaacagttgaccctagggcatgtaaacagttatgacagtttcttctttttttttttttagacaaacaaggggagggggtcccgtgatgggatcagtcagatgcccgcctggccgctcccccttaggggacttgggctcctcttagcattgacaggccggtataaacccccggctcggatcgagctatgccggatgctgccttaagccttatgaggtcgccacggaaccgcaggtgagggcccacttgaactccgtagctttcgccgtggagctacaaactggaggacaagcgcaagcccttgtcctcccccattcattcaccattcacacagagtttataacagtttttcttttttctttcccagagattctccaagaaacctgaacaaggaaagattagagatagaaaaagagagagagagagaccagtctgccagaaaccaggactcagtcccccagcatcctgggatgtggactgactcaagggatggcccctgtcagggccacttccctcccagacagagacacagaggcgtctaacagaaaaccagggctctaccctctagcatcctagagaaatgggcagagtcaaaagagggacaccctcatcagggtcgcttccctctgccagaaccaaagtcaaatctgacctacctgaccccggggtcagcagttgaggactcagaggtggaatttttgtgggcacccacatggtagtcgatccgctgtcctccggaagacggtcaccctttggggacctggaaatttttttttcaggtggcactcccccctacaagctggctgtccttccgggggagcacacagcgggcccggctctcgcccggtgacgtttctcccggtgacgtttctcgctggggcctccaaatgtcgtacctgagcgagttagagaaaacgccacactttgagacaaattaaaagtccatttatttagctggccgccaagagatggctaatgctcaaaattctctccgctctgaagaaggggctagatcttcttttatactttggtttagaaaggggaggggaggtctagttaaaacaattttacagaaataaagtaagcaaaaaagttaaaaggataaatggttacaggaaagttaatagttccaggtgcaggggctttaagattattacaaggtgatagacgcggggcttttgggcataatcaatcggatgaattcctcggaactgcggatatagcttgccacagtatcttaacagttaattgcattcttggatgtgctgggagtcagcttgcacaagttaagtccttgaggaaggggctgccagtgaaagagccaagatggagtccatctggcgctcttagctaagggagagtcaattcaggtggaaacaaggctaggtgatttaaggaaagggagagtctaaaaacagggttagtaaaaaccaggttgggcattacactactaagatatcaaaaccaggaacttacttcctttaaaacaattccaaactaactcgctgtgccttacacagaaatttcccccaagaaatatggttttataaagcctgagaagttgttgctattaggacaaacaccaaaactaaaaattggtttaattagcaacaacaaaattccattttaactggctgtccttatcagagacagtccactaaataatacaactggcaaaaagtgagattttgtaaaggttggggtgctttattataaacataacataaaccaggaatgtattttaataaacctcaacctgcgggtcactccctcccaggcgtgcaacaaaacacctgcctagaaatcaaaaggcgttttacccgagtgggctgaaaaagccccgtttttacctttaatctggagacaatacgggtcagaggtcaggaaactacatcagcgccagtgcgagcgcccacgagtccggtggacggatgagaaacggccggggggcagcctgagtcccagttcccgccgtggcaatggccaatttcccacccgtggacgcaaaaggccaggactccacgctgctgaccctccagcgtcccatgtccggcaggcacgtggccgaatagcccaagactgaggactcacacttcccactttgcacctggaggccacctgcagaccaaccttgcgccaggcttccggaaatgggagggcgggcttccggaaacggcggccaatgggaaacgtgatcagatgttactaggcagacagtccgtttccaggcaacacagaagaaaggaacgcgctcagtcagcctcaaatagacggagatttcagccaatggatgtgcaggttccctccacattagccaataagaagtgcttggggcctacctgcctacaagcacagcaaaagctttcctgcgcatttttgcgctggaatggctacctgccgcgccaaatcaaaatttacaatcacccttggtgctgtttcctgcactttcttggagatttgcaccaggcgctggagaccctcccacctggcccatgcctgccacccggtgaacaccaagacccaaccttctgcaccaccagtcttgttgtcagcgaacaggctagtaaattattgaaggggtggcctgcccctccacacctgtgggtatttctcgtcaggtggaacgagagactgagaaaagaaagagacacagagacaaagtatagagaaagaaaagtgagcccaagggaccggcgctcagcacacggaggacctacagggacactggtctctgagttccctcagtatttattgatcattatctctaccatctcggagagggggatgtggcaggccaatagggtaatagtggggagagggtcagcaggaaaacgtgaacaaaggtctctgtgtcataaataagtttaaggaaaggtgctgtgccttgatgtgcacttatacaaacatctcggtgcattaaagagcagtattgccgccagcgtgtctcacctccagccctaaggatgttttctcctatctcagtaagtagaacatacaatcgggttttacaccaagacattctattgcccagggacgagcaggagacagatgccttcctcttacctcaactgcaaagaggccttcctcttttactaatcctcctcagcacagacccttttcgggtgtcgggctgggggatgtcgggctgggggacagtcaggtcttacccttcccatgaggccatatctcaggctatcacatggggagaaatcttggacaatacctggctttcctagacagaggtccctgcggccttccgcagtgtattgtgtccctgggtacttgagattagagaatggtgatgacttttaacaagcatattatcttcaagcacttttttaacaaagcatagccctaaatccattgaaccttgagtcaacacagcacatgtctctgtgagcacagggttggggctagggttacagattaacagcatctcaaggcagaagaatttttcttagtacagaacaaaatggaatctcttatgtctacttctttctacatagacacagtaacagtctgatctctcttttccccacagaagggaagggagggagggagggaaagaaaaagaaaccttaagcattttttacagatgagggttctgctctcccttagttcagccatgctgtgggggaaggggaaggagtgtggtaagatggcagaggaggaaataaaatatggatggcttctgccttttcagttcttttcctcatttcctggcttactgtccctggtttctgactgctttgtggtgaagcttcagaattggagagaaaaagaggccagaattggtggcttatgcctataatcccagcactttgggaggtcgaggcaggcagataacttgaggtcaggttataaatgtttaatacctaaaatgatcaatacctaaaaaaaaaattttttttttgagagggagtctcattctgtcacccaggctggagtgcagtggcgcgatctcggctcactgcaacctctgcctcctgggttcaagagattctcctgcctcagcctcccgagtagctgggattacaggtgagcaccaccacgcccagctaatttttgtatttttagtagagatggggtttcaccatgttggcc[133 bp omitted]gaatgcaaaaaaaaatacagcaaaggcatcattaaaaagcacagtaaacacgattggccaataaacgcatatgaacagatgcttgactcacttgtaatcaaggtaataattttttttttttttgaaaccgggtctcactccaacactcaggctggagtgcagtggcatgatcacagcttactgcagccttgacttcccagactcaagtgatccgtccacctccgcctcccaagtagctgagaccacaggcacatgccaccgcacccaaccaatttttgtattttctgtagaaatggagttttgccatgttgcccagcctggtctcgtacttctgggctcaagcaatcctcctgccttggccttccaaagtgctgggattataggtgtgagccaccgtgcctggcccagtgtaataaatattgaaacttatagcagaggtagggaaatatgaacactgatattcaatgatcaaagggattcaaaactggaacaatggtggagccacaatttggcaataagcagtgaagctgaaagtgtatacagcctataacgaacaatttcatttctaggtaataccttagattcttgactctttaaggaaattaaaaaatacacaaaatgatattcaatatagcatctttattaccacagaaactcatttatgtccttaatcattgtttaatataatatataagcatgtttaacacaaacatatcaaggatcgggctggaatcttttccattctatagaaaagcactaaccatccattaaagcaggtagctactttcagagcatgatatgagctgcaaaaaattgccctgacttatgccgcccccaacacaaccactcaccatatctaaaattacacccttgaagacattcattgtggttatggtagcatctaacaaagctgttcctattccagatattcggactgagaattccacaataaatttgagatacactcagttaaataaaaatgtctttactaaatctttggcaaactgatcatgtatactttgaattcctcaaaagtagatttttattttattttatttgagactgagtttcactcttgttgcccaggttggagtgcaatggcaaaatctcagctcactgcaatctccatttcctgggttcaagcaattctcctgcctcagcctcccaagtagctgggattacaggtgcaagccaccacgcccagctaattttgtatttttagtagagacagggtttcaccatgttggccaggctggtctcaaactcctgacctcaagtgatctgctcgccttggcctcccaaaatgttgggattacaggcgtgagccaccgtgcctggccaaaagtagatgttttatgttttgcttcatttgcctattttcccaagaaatctttttttcaaataccatcgagaattaatattccttgaagcaaacttctggagaatgttgaatttaggggtcaaacacaggctttctggaggtatttggtgcttgggaaaagaaacactgacctattagcaaagatagattttgtaataaattctaaataaactttatttagaattgtgaaaaatagaatcttcataatgaaggtggtctagaatttgctttcagaaactatcttcatctaatttttattaggattattttaccttgcagaattaattggtaaaatctttaggattatctattccttaaagtttttataagtatcagattttttaaacagggagttcacacacacacacacacacacacattttttgttaatctatttgggttatacggtgagttaattgtaaaacatattccttttgggggaaaaatgcaatcctacatttttacttgtactggaatgaatatacacgtttgtgcatgtgtgcatgtatagttttaccatattatgtttattatttttgagacaggttctcactctgtcacccaggctggagtgcagtggcgtgatcttggttcaccgcaacctctgcctcctgggttcaagcaattctcctgcctcaggctccccagtagcttagattacaggtgcccgccaccatgacaggctaatttttgtatttttagtagagatggggttttgctatgttggtcaggctggtctcgaactcctgacttcaagtgatccacccacctcggcctcccaaagtgctggggttacaggtgtgagccactgtgcccggcctagttttgccttataattttaaaaatctgcttgatataatctagagttgtgtctcttttatcatcattaatactctaaatgtattatctttcattttctcttccttgattataactgccaaaatctaatcactattaacattgaatcaagtctaatattctccattctcttaatttctactttctactgttacttggctgttcctttttttttttttttttttttgacagactcttgctctgttacccaggctggagtgcagtggcgcgatctcaactcaccacaaactccgcctcctggattcaagtgattctcctgccttagcctcccaagtagctgggattacaggcatgcaccaccatgcctggctaattttgtatctttaatagagatggggtttctcagtgttggtcaggctggtctcaaaatcccgacctcaggtgatccacctgccatggcctcccaaagtgctgggattacaggcatgagccaccgcacctggccacttggctgttctttacttgggttggttttattttgttgtttcctttttcttgacggaaatacttattcattccctcaacacattcatctgtgtgacaggcctggtgttgctgctgtgggtaagtgaagaagatgaagactgtatccacaaataagatttccttaccacattacagggcattaatttgtcactgaacagaactttgattatatctgacaaggttagatgtgcaggcatctcactgtcattcatttctacatagtctataattttggttttgattttaaacattttattattgaaatttcaaacacatacaaaagtagaaatattagaacaataagtctccatgaacaaaacactccacttaaattatcaacatgttgccaatttagtttccagctctctttgccaattatttcttttgctagaatattttaatccaaatgtgtctatcttcatttcatagtatgtatctcatatcatacgatcttttattttttataatcacactgacataatccctaaccaaattaatatatgtaaatatcatttaatatttagtccatgtccacacttccctcactgtctccaaaatggctttttatgttttgttcaaaccaggtccaagtaatgccaacatactgaatttagttgatatgtctctttaagtctcttttaatctgttaatggttgcccttccccttgtattttcatgctacctgttagttgaagaaatcaggtaatttgctctgtagaatttcacacattctggatctgtttggcttcttccttgtggtgccctttatagccagccctccatatgtgcagattcaaccaatctcaaatagaaaatactcaaaaaaaaacaataaaaataaaatacaataaaaataatgcaaattgaaaaatacagtataacaactatttacatagtatttacattgtgataggtataagtgatctaaagataatttaaagtatacaggaagatgtgagtaggtaatatgcaaatacatactatgccattttatacaagggacttgagcatcctcagattttaccatcagtggaggatcctggaaccaattccccatggataccaagggatgaccatatactgttcatctagtccctgtctgctttcagttcattattccagcaataaggctttgtagatggtggtgtggacttcctattgcattacgtcaggaagtgtgttgtctgatagacccatttttattaaggttaaaacagatcaaagggttcagaggtggccagtttgatagatccaccataaaaatctcgctataaaatatttcacctattagttgtagtacccattgaagatcatgttttctggacccattattccattaaggtctagaaaatggtgatttttctaatcctctaattccttctagatttattagacttcttcaaaaaagaaaaacccattcaaaaaacaaattttttttttgagacagggtctcactctgtcacccaggctggagtgcagtggcacgatctcagctcactgcaaactctgcctcttgggttcaagtgatcctcccacctcagcctgggactacaggtgtgtgccaccatgcctggctaaattttgtatttttagtacagacagggtttcaccatgttaaccaggttggtctcaaactcctggcctcaagtgatccacccaccttgtcctcccaaagtgctgggattacaggtgtgacccctgtgccaggccaaattcatttgaatttgatgaacttctggtgaccctgaaatttggttcacatgggaaaaggaaactaaatgacaatttttcctctgatttattgatttcaagaataatgagttgggctgggtgtggtggctcatacctgtaaccccagcacctttggaggccaaggagggaggatcacttgagcccagaagttcaagaccagcctgggcaacatagtgagaccctttctctaaaaaaaaaaaaaaaatttaggtggaagaatcacttgagcccaggaggaacagggtacagtgaactgtgcttgtaccactgcactccagcctgggggacaaagtgacaccctgtctcaaaaaaattatacattggtgctctagcatctttcataggttaccaaattatgcagccacaatcaagtaaactatcaaattattggtgggatcacatcaaaaactcaacttgaaacaactcctactggttgaagatatggcattttgagcatccaaaagtatactgacttatagaatgatgttttgtttctttcccacaggagttttatacacacacataaatatacacaacaatattaaattcctaggtggttaatttcttttaagccacatttttgatagtttctaattaattttaaactgtggtcagacaacagggattgtaagccttttgctttctggaattatgggaaaatcatttcctatttccctctaattcttcaacagctgtattactagtgacctcacattcatgaaattcatttttggcatgaaatttctaatgcagctcaagtgctgaagaacttcctacattcactacaatctaaattttacctagaataaattatgtttaataatttctgagaggtgacaggaggcatttctacatttattatgtctacagatcttccttttacgtgaattcactaatactaatgacaataataacaattacagataatatttacagaatacatgctatatgactgtgattcctccaagtattaactacttactccttgcaacaatcctattccacagtgtggcaggctgactctaaacaggccccccagtggtcctgtctccaggacttattcacactcttgtatcatcccgttctcttgagtgtggactatcctagtaacttacttctaccagtagaaggtgagggaatgttacttccatgattagattacacaagatggtaacttccatcttgctagcagactgtcctcccttttggcttgcatgccttgatgaagcaagcagccatgttgatgaggctattgtggccaggagctgcagtcagcgttcagccaacagccagctagaaactgagaatctcaatgcaacaggcctcacggaaatacattgggtaacaactatgttagtctggatgtggatccttccccagttgagccttcagatgagacctcagccctggctgaaatctgtagccttgcaagagaccctgaagcagaggacccaactaagtcatgcctatactcctgatccaaattataagatataattatatgttattttatgctactaagtctgtggtaatttattacgcagcaataaataactaatacatataagtactattattaccattttacaagtcagcaaaatgaggcacagaagcttagtatcttgtccaataaatcaaactggtaatcaagtggagaaagggagataatgacagataaggctaaagattttcctacattcattacattattctctcataggaatttgctgaagataaaccatgtttaaatggtgttggaaggcttttaaatcaacatattctttctctaatataaaatttattatgcttggaattgagcatgaaacacattttctcaaaaatgaattttctgatgttctgtaacatcatatacatttgaaggctttcttctattaaattccattatgaatcttctgatgctgagtaaggtgtgaatgctgtctaaaggccttcttacactccttacacttgtagggcttctcaccagtatgaattctctggtgttgagtaagaaatgaataaagtctaaaagccttaccacattccttacattcataaggtttctcaccagtgtgaatactctgatgttgggtaagttgtgagagcagtctaaaaggttttctacattccttacattcataaggtttctcaccagtgtgaatactttgatgctgagtaagttgtgagagcagtctaaaggcctttccacactcttcacattcatagggtctctcaccaatatgaatgctctggtgtgaaataagctgtgagtaactactaaaggtcttccaacattccatacattcatagggtttctcacgagtatgtattctctgatggcgaactagttgttgtcttaatctaaaagtcttcccacattccttacattcgtagggtttctcaccagtatgaatactctgatgaacagtaagttgttggcatattctaaaagcctttccacactccttacattcatagggtttctcaccaaaatgaattttctgatgtactctaaggtctggaccacatacgaaggctttcccacattccttacattcatagagcttttcagcagtatgaagtctctgatggcgtgtaaggtgtgtacactgtctaaaggtctttccacagtccttacattcatagggtttctcaccagtgtgaattctctgatgtcgagccagttgctgatgtactctaaaggcctttccacattccttacattcatagggtttttcacccgtatgaagtctctgatgttgagtaagttcttggagcactgtaaaggccttcccacactccttacattcatagggtttctcaccggtgtgaagtttgtgatgtcgaataagatgtgcacgctgtctaaaggcctgcccacattccttacacttataaggtttctcaccagtatgaattctcaggtgttgactaagtgttgagcgacgaataaaggtcttcctacactccttacactcatacaccttttctccattatgaacgatctgatactcagtaagaaaattgtgccttttgtaagtggtcattttttcagaggtaattttcacttgcccaaaatatccctcttgttgttccttttccccctcaatcttgcttttgcattcccaatcattcctaaaaatggaaccctgaaggctatagcttttaattctttccattatatcccactgaaatgaatatatttcataaatgtccttttctggagataaagtattggtcctgtatctggactccaaatctgaaagaaaacaagaaagcaaatacatactgttttcctgttccagaaagaaaaaacaaacaaacaaaaaaaccacttctatagagaaaaggcacctaaaataatgcctgttacaaattgaatggattagacagatctcaaacatagacatttctgccacaatcttatatatgtgtacctaaaaaaccttatcttctacaaaagtacacactaaaaattactgtgttcagaagaaaaataggcccggagcaggaccacttaattttttttttttctttggagatggagtctcgctctgttgcccaggctggagtgcagtagtgcgatcccggctcactgaaagctccgcctcccgggttcacgccattctcctgcctcagcctcccaagtagctgggactaccggcacctgccaccacgcccggctaatttttttttgtattttttagtagggacggggtttcaccgtgttagccaggatggtatcgatctcctgacctcgtgatccacccacctcggcctcccaaagtgctgggattacaggagtgagccactgcgcccggcgaggaccacttcattctatgcctttttttttttttttttttttttgagacacagtcttgctctgtcacccaggctggagtgcagtggcacaatctcggctcactgcaacctctgcctcctgggttcaagcaattctcctgcctcagccctcctagtagctgggattacaggcacacacccccaagcccggctaatatttttgtgtgtatttttagtagagacagggtttcaccatgttggccagactggtctcgaactcctgacctcaggtgatccgcccgcctcagccttccaaagtgctgggattacaggtgtgagccaccatgcccagccaattctatgcatctttaatcagtagaacactaacaaataaaatagttgacatctaaagggataaaccaaaagacacctcagcacttcatgtgtattaaaatgcacaaaaataaagagacaatgctagacttcaggtcctgagacactgtacatgaaaataaagcccagagccagtgaggacatcattaaggtgggagtaaggtaaagtgcagcctgtctttagataagaggccatgcaaggttgatggtatattcctctggggagggagacctgggtgcagacatttattattaattttcttaaaacgggtgaaagggctcctgataataaagcatcatgtagaaggcctttgtctttcctactgaacattataaatatacctccactaagctagctccactggactagaaaaattactcataagccaatcatctacattatacacaattcttttgccactattctgctaatgtgtaccatgggacagattgcactctcatcattttgaaaaagggaaacacagcaaataaagagtccaggagtgcaggcagggctggtgattaggaaagcaagtcaaatcagtgaagccctgttttaagtgtggataagaatcacctagagatttgtttaaactatgcagaggtgtttttaactgactgaaaccatctataggacaaagtcctgggcaagtaattgttttgttcttgtttatattcttcaagaaattattgggatgctgatcaatatttgagtctctctgtttaaatgttttcaatgctatctctttaccattataataaaatataaatacctgagcataaataataaagctgctgcttgtcaacaaatatcttctcccatttgttctctctgttcatagcatactggcctctttcaacgcacaaaatgccccacaactgttccaaataaataggactcttcacaggctgctccttctttgaggaatcctctgacactgcatggttggctggttttcattctcagcctcaaatcaaaatcacttcttcacaaaggctagtcctgctggccctatttaagtctatgcactttacgcttgtcttactccattttctgttgcttataatgaagtatctgaaaatggataatttataaagaaaaggaatgtattattattatttctactctactctgacggattaaggagtttatttcttaacaattatgggggctgagaactccaaagttgagggactgcatctggtgagagccttcttgctggtgacaaccctgcagagtcccaaggcagcgcacagaccatcaatgggtaatgggggctgagtgtgctagctcaggtgtctcttttgcttcttacgaagccatgtgtcccactcccataataactcattaatccattaagccatgaaagcccttgtgacccattcacccctcatagatcccacccattggggattaagtttcaacatgagttttggaggagacaaacattcaaaccacactctcttagcacactctttctcttttctttgtttttttgagatggagtttcttgttgcccaggctggagtgcagtggcacaatctcagctcactgcaacctctgcctcctgggttcaagtaattctcctgcctcaacctccccagtagctgggattacaggcacccaccaccaggctcggctaatttttctgtatttttagtagagacggggtttcaccatgttggccaggctggtctcgaactcctgacctcagatgatctgcccgcctcggcctcccaaagtgctgagattacagtgtgagacactgcacctggccatgcacattctttttcatatttataacactttctccaatttttgaatcatatgtttattaattttctcatattattctgttagtttagttagtctgttagttaagtgttatccttgaactacccccagggcagaaacaatctctattatcaccattaattagcaaatcccaaatacataatagatattaccagtttaattctcataattatataatcattaattaataggtatatctgcctctaatctttataccagaggtccccaacccccaggccacagaccagtccatggtctgttgggaaccgggctgcacagcagaaggtgagcagcaggtgagcgagcatgaccgcctgagctcggcctcctgtcagatcagcggtgactagattctcataggagcgtgaaccttattgtgaactgtgtatgcgagggatctaggttgcacactccttatgagaatctactgcctgattatctgaggtggaacagtttcatcccaaaaccacgtaccattttctcccgccccagtccatggaaacattgtcttccacaaaactggtccctggtgtcaaaaaggtagggactgctactttataccatattataatgatttacttatctctgctagaatttatactatgacttatcaatgctacacttactcaaacttttgttggccgggcactgtggttcacacctataatcccagcactttgggaggccgagggggcagatcacctgaggtcgggagttcgagaacagcctgacccacttggagagaaaccccatctctactaaaaatacaaaattagctgagcgttttggcaaatgcctgtaatcttagctactcgggaggctgaggcaggaaaattgcttgaatctgggaggcggaggttggggtgagccaagattgtgccattgcactccagcgtgagcaacaagagtgaaactccatctcaaacaaaacaaaacttttgttccttcatatcctccccatgtgtggtcctatccattcccatgtagccaacgcaactaaagtattttttttcaatcatgctaacattgaaaggcttatgaaatcctgagcaaaaggtcatggtaaatgtcaagtacagcagaatgactatcaaaaatggaagggcatctggggtcacctgaatgcaacagagtaaaaataaaggctatgttggatgtgggcttgaagatcatgatccagatggcgtactttcatgaagaaaatcgaaaatgctgaatgaagtaagcaaagacatgggttgagatggtataggaaaggaggagaatttttttctgtgactacagtataaatgtgtaaaactggtgaaatgacccaaagaatagtttgtgatcactgcaagacaaaataggaaaaaacaaaatcatgaaaccaaaagacatcttcacttcagattttaaaactctttcctaaatatagaacagtaatattgaaaaatacattatagagaacctatgaaatatagctacagatctcagaagaaattttatagatacatttaaattcttagagcaatagaaatgaaggaaaatatatgagtatcccacacaaaagttagaaaaagaacaacaaagtatactgaggaacaaagaatgaagaaatagattaaaatgaaagcagaatttcattaattagataacagaaatgaaagacatataaaaaatccaggttggccaggcacgatgactcatgcctgtaaacccagcactttgggaggctgaggctggaggattgcttgagcccaggagttcaagaccagtctgggcaacatggcaaaaccctatctctacaaaaaattagccaggcatggtggtgcttgcttatagtcccagctactcgaaagactgagggaaagaggatcgtctgagcccgggaggcgggcattgcaatgagccatgattatgccactgcctgggtgacagagcgacaacctgtctcaaaacaaacaaaaaacccaggttgtttggaaaacaaaaacaaaaacaaaacaaaaaaacaaaaaacaaaaacaaaatcagtggaacataaccattagctaagataataagagaaaaaggaaagcattcaaacaaaataaaaaatggccactagctattcagtgacaactccccatagagctctcactttttttttttgagacagagtcttgctctgtcgccaggctggagtgtagtgtggcgcagtctcagctcactgcaacctctgcctcccgggttcaagtgatcctcctgcctcagcctcctgagtaggtgggactacaggtgtttctaccatgcccagctaattttttgtatttttagtggaaacggggtttc[133 bp omitted]aagcactacctacctttgttctgggatatcttttcaagaatgtttctatactataacaaacagccttgcaaggtagagataacgtctctgtctggatcaataggcaggttcgcttgcttgttcaggataataaaggtaatgtctccttccaagctaaggctacgtacacttattgcccacgatgaatgatttgggttcttcaagctcagtgttccttttctataaggcagctcactgcatgctcaggaactatctagacccatccttatcagcctcatgtgacttgcaggcaaggaggaactgctggctgtgctgagagcaatcaaatcctttgtctttgactgagagcatgtgtttcctgccagcatccatgacactacggcaagctaacttgtcagcttgcaagtagggtgaagttgtagaaataatatagttcttgacacatgtaaataactaacaaaacagaatattttgaaaattataagggactactatgacaaccaaggctaattactaacaaagtatagaaaaagtattcaaggctgggcgcaatggctcacgtctgtaatcccagcactttgggaggccgaggagggtggattgcttgaggtcaggagttcgagaccagcctggccaatatggtgaaacctcatctctacaaaaactacaaaaattagccaggtgtgctggaaggcgcctatagtcccagttactcgggaggctggggcaggaaatgacttgaacccaggaggcagaggttgcaatgagccgagatcacgccactgcactatagcctgggtgacagagtgaggctccatctcaaaaaaaacaaagaaaagaaagaaaaagaaaaagtaatcaaagacccactccaaaaattattttgaagattatcaaaacttgagaaagcactcaattatatttaaagtggcccagaacattttataaagcctaatactccaagttatctttgagtataaaaatgaaatcaggctgtgcgcagtggctcacgcctgtcaatccagctctttgggaggccaaggcaggcagatcacctgaggtcgggagtttgagaccagcctggccaacatggtgaaactgtcatactaaaaacacaaaaattagctgggtgtggtggcacgtgcctgtaaccctagctactcgggaggctgaggcaggagaacctcttgaacccgggaggtggaggttgaggtgagccaatatcatgccactgcactccagcctgggcaacagagtgagaaaaaaaaaagtcttctttctctttgcccacacatattcccttagaaaagtcaatttctaatggctttctttggtcaccagatagtcacatagaataggcaaagcctacagaacagaaaaataagtaattgggtgccatgtaataatactacagggatttgaattaaggattgacatttcattttaaatgaaattgtgtaactggcttttaagtacattttaaaaggattgggtaggtacttgggtcgatacttctgtttgaggtgttcaagccacaaatatacaaatatatagctatcactgataaacctgggaagctgacccctttaggctaagttggccttcatgagatcagaatgcccagcacctgtgtatcagggtaacaccagctgactccttgatatagaggttctggaggatgtcttaccaggacagtcagggaagtcaggattttgtttgtttgtttggagatgaagtctcactctgtcacccaggctggagtgcagtggcacaatcttggctcactgcaacctccgcctcctggattcaagcgattctcctgcctcagcctcccaagtagctgggattacaggtatgcaccaccatgccctgctaatttttgtatttttggtagagacggtttcatcatgtttagccaggctggtcttgaactccagagtcaggatttgaccccgcctgtgctgcaaccttctgggacctcctgtaggaagtgctatacctgctttggaagaagcagctctcagaggaaataacaccaatgggttcctccccaagagatcccagaaaccagaggtggaacttaagctggcttgtattttttttatcaatgctctgactctgtatctcagtggaaaattctattcaacaagaagaggagggctgggcacagtggctcacacctgtaatcccagcactttgggaggccgaggtgggcagatcgcctgaggtcaggagttcgagaccagcctggccaacgtggtgaaaccccatctctactaaaaatacaaaaaattagccgggtgtagtgccacatgcctgtaattccagctacttgggaagctgaggcaggagaatcacttgaacccaggagaggcggaggtttcagtgagccgagattatgccattgcattccagcctgggctataagaggggaactctgtctcaaaaaaaaaaacaaaaaaaaaaaaacaaaaaaaaaaaaacaggaagaacataatttctcctctagaactaaaaaatatttgtattttatcagaataatataccagtttaattaataattcccttaacgccctttgaaaatgtgaatttacaggctgggcacagtggctcacgcctgtaatcccagcactctgggaggctgaggtgggtagatcacctgagctcaggagtttgagcccagcctgggcaacatggcaaaaccccatctctactaaacatacaaaaaattagccaggcgtggtggtgtgcacctataatcccagctacttaggaggctgaggcaggagtatcacttgaacctcaggaggcagaggccacagtgagccaagatggcaccactgcactccagcctgggtcgcagagcaagactctgtctcaaaacaaaaaaaaaatatatatatatataatatatatataatatatactatgtatattatctataaatattaaaatgaaaatgaaaaatctaatggacagctttaacaacagcttagacttagcacaagagaagactagtgaatagagacatggatttgaagaagatttcaaggttgaaaggaataaaaaagaacaatagataggctgggcgtggtggctcacacctgtaatcccaacactttaggaggccaaggcgggcagactgctttgaactcaaactccacaagtttgagaccagcatggccagcatggtgaaaccctgtctctactaaaaatacacacacaaaaaagtagctgggtgtggtggtgcttgagcccgggaagtggagtctgcagtgagctgagattgtgccactgcaccccagcctggaaaacagagccacactctgtctcaaaaaaacaaaacaaacaaaaaaaaaaaacagaaaagaacataaaagatacatgggacaatgttaaagtgtctaacatatgtgtaactcacacagagaaaagaacaaaaatgagaaacaaacactatctgaagatatagtaaccagaattttcccaaactgacaaaagacatcaaacccaagatttaaaaaaattcctagctgagcctagtgactcaggcctgtaatctcaacaatttgggaagccaaggagggaaaactacttgaggctaggagttcaagaccatcctgggcaacatagggagacccccatctctaaaaaaatacaaaagttcactgggtgtggtggtgtgcacctgtggtccaagctacttgggaggctgaggtgggaggatcacttgagcccaggagggtgaggctgccgtgagctgaaatcatgccactgcactccaacctgggcatccaagcaagatcctgtctttaaaaaaccaaaaaaaaacaaaaaacagcttcctaaatacttcaagcagatgacaacacaatatccaccacactacaaaactacaccacaatataattgggatttttacatttcactgcaatataaaattaggcacaccacagtaatctgttaaaaaaaaatccaaaagcagctaacgggaaaaaatacctctaaaacaatatctctgaaggagttacaatataagtgacaaactactactcaatggaaataatgaaagccagaagacaaggaggggatatttgctaagagaaaataactgccaactcagaattctattctccacaaaaataaagacaaaattttgtaccctttaaaaattaagacgtaataaagatattttctaataaaacctaagataatttattgccagtggacacaataaaataaatactaagtaagttctttgggtacacagaaaatggttccagataaaagcaatgcaatgcagaaaataataaggagcactgtaaaaggtaaatgtgtgggcaaatgtaaaaaaaattcactacttattacaataagaaattaatgccctgtggggatt[131 bp omitted]gcgaaaccccgtctctactaaaaactacaaaaattagccggcatggtggtgcatgcctgtagtcccagctactctagaggccgaggtgggagaattgcttgaacccaggaggcagaggttgcagtgagccaggatcccaccactgcactccagcctaggcaacagagcaagactgcatatcacaaaaagaaaaaaaaaggcatatgacaacaaatgcacaaaaaactgaggacacataaaaggaattaaaatactattaagggttgcgtacagtggcttacgcctgtaatcacagtactttgggaggctgagacaggaggatcatctgagaccaagagtttgagaccagcctggccaacacagtgagacccccatctctaaaataaaacaaattagccgggcatggtggtgtgtacccgtagtcctacctacccaagaggctgaagtaggagaattgcttgagcccaggagtttgaggttgcagtgagctatgatcacaccactgcactccagcctgggtgatgcagtgagaccttgtctctaa[137 bp omitted]tggtgaaaccccgtctctactaaaaatacaaaaaaattagcggggcgtggtggtgagcgcctgtagtcccagctactcgggaggctgaggcaggagaacggcgtgaactcgggaggcagagcttgcagcgagccgagatcgtgccactgcactccattctgggcaacggagccagactctgtctcaaaaaaaaaaaaattctattaagatccctacaattttgaacaagatataaagaagctaatttcagattcaatgcaataagtaaataatgtacttgttattgtctaaggcaaccacaagaagaaaaataaatgtatgtataatgatcatgttataaaaggaaaaactagaataaaaatgcttgattaatccaaaaaaggcaggagaatgaaaaaagtaagaacatattaagcaaacagaaaaacactgggaagacagcagatttaaacccaaatatgtaagaaaattaatgaaatgtagatgcataaaatacatcaattaatagacaaaaatgactgggcacagtggctcacacctgtaataccagcacttcgggaggccaaggtgggagaatcccttgaggccaggagttttagagcaacctggcaacacagtgagacactgtctctacaaaaaatgcttaaaaattagccatgtgggctgggcgcggtggctcacacctgtaatcccaacactttgggaggccgaggcgggcggatcacaaggccaggagatcgagaccatcatggctaacacggtgaaaccccgtctctactaaaaatataaaaaattagccgggcgtggtggcaggcgcctgtagtcccagctacttgggaggctgaggcagaagaatggcgtgaacccgggaggcggagcttgcagtgagccgagatcgcgccactgcactccagcccgggcgacagagcgagactctgtctcaaaaaaaaaaaaaaaattagccatgtgtggtggtgcgcacctgtagtcccaactactcaggaggctgaggtgggaggatcacttgagcccaggaagttgagccatgttcatgtcactgccctccagcctgaggcaacagagcaagaccctatctcgaagaaaaaaaaaagatcttccttacccacactggggatgggatgctgtttccattactggaggcagcctagtgcaggctgttgcagtacaagcacagtaagggaagtattcagagaagagcagcccagcatgtaccaggcaaacctatcaggaatctaacattttctctcagccttccactagtaccattctcagcaaaaccactatcatcttcaatgtggacaaatgaaatagcctcctagtgggtcttcaaactatccatcatgcccttattcaatctattctctgtagagtggtaattatttaaaaatcagctcatgtaggccgggtgtggtggctcacgcctgtaattccagcactttgggaggccgaggcaggcagatcacaaggtcaggcgttcgagaccagcctgaccaacacactgaaaccccatgtctactaaaaatacaaaaattagctgagcgtggtagcgtgtgcctgtaatcccagctactcgggaggctgaggcaggacaatcgcttgaaccaggaggcggaggttgcagtgagccgagattgcgccactacactccagtctgggtgacagagtgagactccatctcaaaaaaaaaaaaaaaaaatcagctcatgttactcccctgctcaaaaatctccagcagctttctactacacttaaaataaaaaaaagtcagatgcagctgagtgcagtggctcacacctgtaatcccagcactttgggagactgaggtgggaggatcgcttgagcctaggagttcaagaccagcctgggcaacatagcaaaactcccgtctctacaaaaaatacaaaaattttccagcggtggtggcatgcgcctgtagtcccagctacttgggaggctgaggtgggacgatcacttgaacccaggagttcaaggctgcagtgagtcatgatcacaccactgcactccagcctgggcaacagaacaagaccctgtctcaaaaaaaaaaaaaaaaagccgggcacagtggctcatatctgtaatcccaacactttgggaggccgaggcaggtagattacaaggtcaggagttcaagaccagcctggccaacatggtgaaaccttgtctctactaaaaatacaaaaattagccaagcacggtggtgggcacctgtaatcccagctacttaggaggctgagacaggagtatcgcctgaacctgggaggtggagattgcagtgagctgagatggtgcaactgcactccaggctgggcgacagagagagattccatctcaaaaaaaaaaaaaaaaagtcaaatgccttctcctatgatatacaaaccattacatgatctcgctcttgcctaacattatcttgtttctacacctttcacttaccttttgaataagcatcttaatcatcttgggcttcttgcagttcctcaaaaatacaaagctcccctcagcccacccaaagcctttgtatttgctgttctctgccaggaatgccgttgctttagatattcatatggcctgggctcttttttcatgtcactattcaagtatcacctcctcaaaatgtcctgaccaccctatttaaaacatccctatctctacttgccaacttccattctcacccaggctggaatgcagcagcgcgatctcggctcactgcaacctccacctcccaggttcaagcgatacttctgccttagcctcctgagtagctgggactacaggcatgtgccaccacgcccagctaattttcgtattttcagtagagacaggtttcaccatgttggccaggctggtctcgaactcctggcctcaagtgatcctcccacctcagcctctcaaagtgctgggattacaggcacgaagccactgcgcctggcccttcttacttttcttaatacttgtccctacctaatattatgtattgatgtacttgtttacttcatgtccttactcctattaagatgtaagcaacatgattgctgggacccatgattctcattcacatctgctccactggtgtccagcacaacacctagttccaactaggcactcaagtatttgccaaataaataaaggaatatatttctagccaatgaaagacatatcaacctaatcataatagaagctagaaagaaactgggtcctaaatatggactgaactctgttcccctaaaatttgaatgttgagccctaactaactgtatgtggagatggggcttttaggaggtaattaaggttaaaggaggcctagaggaggggtcctaatccactagaattactggccttgtaagaagaagaagagggccaggtgcagtggctcgcgcctgtaatcccagcaccttgggaggcagaggtatgaggatcacttgagcccaggagttcaagaacagcctagggaatacagggagatctctgtctctataaatttttttttttttaaatagctaagtgtggaggcatgtgccagtaaacccagctactcaggaggctgagacgggaggattgcttgggcccaggagttcaagactgcagtgagctgtgatggcaccattgcactccagcctgggcaacacagtgaagccctgtctcaaaaaaaaaaagaagaaaaaaaaaggaagagagtgacctctttctctctctgtgtcatatgaggacacaacaagaaggcagctgcctgcaagccaggaagagagacttcaccagaacctggcaccctgattttggacttccagcatctagaattgtgagaaaatacatatctggtgtttaagccacccagactatggtattctgttacagcagcttaagatgatacagatttaaatagagatgaaactgtagtcaccgatcaaaaaaaagagtagcccctctctttgtcaaatcttttccccattcccctcaacagcatccttaaaattttttttattttaaaataattatagatccatgggaagttgcacaaaatgtacagaaaagtcctgtgtagacttcacccagcccctcccagtgttaacatcttaggtaagtatagcacaatattcaaaacaagaaattaatggggctgggcgcagtagctcatgcctctaatcctagcactttgggaggctgaggtggatggatcacctgaggtcaggagttcgaaaccagactggccaacatggtaaaactccctctctactaaaaatacaaaattaggtggtggcgcatgcctataatctcagctacttgagaggctgaggtaggagaatcgcataaacctgggaggcagaggttgcagtgagccgagatcccgccactgcactccagcgtgggtgacagagcgagactgtctcaaaaaaaaaaaaaagaaagaaattaatgttggtatattccatagagcttacttagacttcaccagttctatgtgcactcatgtgtgtttatttgcatagctctatgcaattttatcacaggtagcctcgcaaaaccaccaccaaaatcaagatactcacctgtaccatgactgcaagatttcctcatgttacccctttctaacccgaaccatcctctacgccctacatccctacccttggaaaccactaatttgtttttccatctctatgtgattttgcaaatattacataaataaagtcatgtagtgcataaccatttgtgattgattttgtcactcagcataatttccttgaaattcacccaagttgttgcatgtatcaagagtttattgcttactgttgctcagtttattcatggtattggtgtgcctttcaatcagttttaattgggctacttatcatttagcactgagctgtgtatatactagatactggtcccttgtcagatatgttttaccactattactctcccagtctgtgactcacccattcatctgcttattggtatattctgatgagacaaagttttcaatttggataaagtctaatgtcttaattttttatttatttattttgagacagagtcccactctgtcacccaggctggagtgcagcggtgtgatcttggctcactggaacctccacctcctgggttcaagcaattgtcctgcctcagcctcctgagtagctgggattacaggcgcatgccaagacgcccagctaatttttgtattttcagtagagatcaggtttcgccatgttggccaggctggtctcaaactcccaatatcaggcgatctgcccgccttggcctcccaaagtgctaggattacagatgtaagccactgcgcccggtctgatttttttatttttatggttattgttttcactcaagaaacctttgcctactcccaagtcataagttgggacactcatcactgtcctgtttccctctaaaaactttatgattgtagcttttatatgtaggtctaaaaaccatctcaaattaattttggtatgaggtaaaagctgagaggtttgtttatttgtttccccagttattccagtactatttgttgaaaagcctttcttctccccattggaatgctttggcatctttgtcaaacaataaatgaccctttagtgcgtgtgtggcagggtatgtttctaggacctctgttgtgttttgttcggtaatctttgccaataacatactgtcttgatcactgtagttttaataaatcctgaagtttttgttttttgtttttttttttgagataagagtctcactctgtcacccagggtggagtgcagtggtgtgatctcggctcactgcaacctccgcttcccaggttcaagagattctcatgcctcaccctccccagtagctgggattacaggcttgcaccaccatgcctggctaatttttgtatttttagtagagatagggttttaccatgttggccaggctggtcttgaactcctgacctcaggtgatccacctgcctcggccttccaaagtacagggattccaggcatgagccaccatgcccggctctgatctatctatctatctatctatctatctatctatctatctatctatcatctatctatctatctatctatctattttattttttgagatggagtcttgctctatcgtctgagctggagtgcagtggtgtgatctcggctcactgcaaactccgcctcccgggttcaaccaattctcccacctcagcctcctgactagctgggattacaggcgtgcgccactacatccagctaatgtttgtatttttagtagagacggggtttcaccatgttggccaggctggtctcgaactcctgacctcaactgatctgcctgccttggcctcccaaagtgctaggattatatgtgtgagccactgcacccggcctgattttttaatattaaccttatatcccatgaccttattgtgatttttcaattattacttcgaatagttgttgtcttgattccttaggactttctatgtacacaatcatgtcatctccaaatacagacttatgtcttcctttttgatctttatgtctcatttctttttcttttgataatggatttttatagtttataatgtattttttaaataggtgccccttaccagattgaggaagttcccttcaatttctagtttgctgagagctttttatcatgaatggatgttggattttgtcatatgctatttttacatctatgaagatgattgctatggtttgaatgtttgttgcctccaaaactcatgttgaaaattaattcctaatggcaatattgagaggtggggtttttaagaggtgactgggtcatgagggctctgctctcatgaatggatgaacctattcatggattggtgagttaatcgattaatgggttatcacaggattgggactgatgactttataagaagaagagaggcctcaactagcacatttgcatgttcagcccacttgccatttgatgccctgcaaagcctcggaattcagcagagtccccaccagcaagaaggccctcaatagacacagccctttgaggctggacttctcaacctccaaaacggtaagaaataaattccttttccttgtaaattactgaatttcaaggtattctgttataaacaacagaaagtgaactaagacaatgatcatacggtctttcattttttctgttaatatggtgaattaacaggtagaaagaaatcctaatcatcatttttgtatatcattatatttgatttgttaatattttattaaaatttttgtatctatgtatggaaaagatgggtttatgctttttttgtaatgtctttcttgggttatggtatgagttatgttggcctcataaaatgcattccttttctgaaggagtttgtataatactgctgctatttcttccttagatgtttaatagaattcaccagtgaaaccatctggggctggcattttctttgtggaaggtttctgataatgaattcaattactttagcagcataagggtattcaatttcttttttatcttgtgtcagttccggtaagttgtacttttccagaaattttaaaatttcatttaagttatcaaatttattggcataaagtaattcatggcattctcttattattcttattattcttcttttttggagtcggggtagagtctcactctgtcactcaggctggagtgcagtggcgtgatcttggctcactgcaacctccgcctcccgggttcaagtgactcttgtgtctcagcctcctgagtagctgggactacaggtgcccgccactatgcccagctaattttcgtatttttagtagagacagtgttttgctgcgttggccagactggtttggaacccctgacctcaagtgaccagcctgcctcggcctcccaaaacgctgggattaccagagtgagccaccacgcccagcctcttattattcttttaacggctataggatctaaagtgaaaatccctctttcattcctgatgttagtaatttatgttctttaaaaagagagaatgtaaattactaggtgtttaccatctttgctgatcttttcaagaaatcaatttttggctttattaattttctttatttcttttctattttgctgatttctgctcttatatttatttattttttcttctaccaggaatagttcttctctttaaagtaggatagaaatatgaaagatgagaaacagtgttgcattcaagatcaatagaaagttcctttgctagtccaggcttaaaagatcttaatttgcttcaagtcccaagccctgcctccataggccaggggctttttgaagagagaccccaacatctcaagggtgtgcctccaccctaatcagtttagctattacctgcagtagtgatttctcaatgcctgctcagccctcactcaccagggcagtatcttcttgtcccttccctcacaaccatcccaggttccttcctttcttcatccaataaggtaatcacatctggtttagaaatggaaggtcctgcttaaaagaaaaatgtgacatggaattatacaccagaaaatctttagatttagatttggttaaatttataattaactacagatcaatatggcactttataaagcctaggagcgaagaattgcaagggagttgaagaatgctcatattaaggtaacttgagggtcacaaggaatagcctgtatgaggttaaattaagtatactaaggccattatattaaccatctggtcaagaacaggccttaatataatttaacctcacacaagctctgttgaaaggcagtattgtgtagagggaagaacacagactggatccagactgcctggcttcacatcctgcctttgtttctgtgttacctagcaaattattaaccttttgtgtctacgttttctcaaataaaatgaagataataatatcttctcatagcgttgttgtgagggttaattaataatgaacaatgcttagaataatgtttaagcccaaatatatggtgatgtttattaacatatacacataatatatgtattagctattagctatttactgttatcattttgatgagtgcatactaaaaggttttttgagacattcccagatcttttctaggatattcattcaatgttaaatgccaggcttttagattttaattttcaattacaaagtaggtagaactgcatatgtctgttacaggaaacagaatgtgtttcagggttttttctgtttgagacagagtctcactctgtcacccaggctggagtgcaatggcgcgatctcaactcactgcaacctcagtctcccagcttccaggaattctcctgcctcagcctcccaagtagctgggattataggcatgcgccaccatgcctggctaatttttgtatttttagtagagatggagtttcaccatgatggccaggctggtctggagctcctgacctcaagtgatccacccgactcggcctcctaaagtgctaggattacaggcatgagccaccatgcctgaccttgaggtttttttgagatggagtctcactctgtcgcccaggctggaatgcagtggcgtgatctcagctcactgcaacctccgcctcctgggtttaagtgattctcctgcctcagtctcccgagtagctgggattacaggcacgtgccaccatgcccggctatgagttttaaataacctttctggatccatctcacactatgttctacagattcctttgatttttagagaaactcagaacccctatgtctaggtattctacttgcagatggtgtgaagcatttatgtcaattctgagctccaatataaggtgaagtctggtttcttgaacaatgcttttgccatattcaaatccatccccttggatactaaggaaatcaggaattacagagtctgaaggaagtctgaagggcatagcagactggacatgatgaaatggagaggcctagttccaacctgacaaagcttaaatcattcctttgagaatagaaagtagttttagagagtttttctaaatatagtcctgaaattgacagcagagaaagctaatatcatttgggataaataaccttacctagtgaaatgaagttgctgtagttctcccacattacatccctatataagtccctctgagcaggatccaggaattcccattcttcctgtgagaagtctatggccacatccctgaatgtcactgaaccctgaaaaaacaaactcaggtattacttgtgaaaataaattaaatacttttaaaatggaaagaggggagattgaggattgcattgcagagaggggtcagatagcatgcaaacagcattgggctgaaaacttgtgacatgagtaggggccagtaagaaaattagtatttctcaagcactgagcctacatgttcttgaatagtcctgtggctatagatatgattacattttcatccaaacatttctagaaatgagtacataacccaaaaaaatcctaattaaatgaaatagtgcacgcaagccttttgaatactatgtgcctccaccataaattctttaaaaatatgaggtcttgaggccaggtgcagtggctcatggctataataccagcactttgggaggcccagatgagaggatcatttgagcccgtaagttcaagaccagcttgatcaacattagcaagaccctgtctctacataaaaagaaatttaaaaatttaaaaatttaaaaaaaaagaaatatgaggtcttgggctctcttttccctttaatgatcatttaaaaacattgataaaaatttatcccacatgtgctacaaaatccaagaagacagattcaaattcatcacaaactcgggttttattataaacactttctcttttataaccaattctttagtaaactttcaaaaattcgttcgatggcagtctacatttttaatatattagattcttttttctttagatattttaattcaataaaatctcgaaagtcttccccaattctcaacgtctacaatatctaatctttatggatgtgaataatcttcttgcttgtcactatctatcatctcttgaacattgtttttttgttcctgagttacaggacactgaatcatgaagatatcataaagatatcacctggacaccattatcaatcatattcttttcttttcttttttttttttttttttttttgagacggagtctcgctctgtcgcccaggctggagtgcggtggcgtgatctcggctcattgcaagctccgcctcccaggttcacgccattctcctgcctcagcctcccaagtagctgggactacacgcatccgccaccacgcccggctaattttttttgtatttttagtagagacggggtttctccgcgt[137 bp omitted]aaagacatccggccatatctggagacaattttggttgtcacaatcggaggaaagggtgtgagtgttacaggcatctaatgggtagaggccagggacactgttagacatcctacaatgcacgggacggccccctacaataaaagactccccatcaaaatgtcaatagttcaggccaggtgcagtggctcaagcctgtaatcccagcactttgggaggccaaggcaggcagatcacttgaggtcaggagtttgagaccaaccttgtcaacatggtgaaaccctgtctctactaaaaacacaaaaatcagctgggtgtggtggtgggagcctgtaatctcagctactcaggaggctgacgcagtagaatcacttgaacccaggagacggaggttgcagtgagctgagatcacactactgcactccagcctaggcgacagagtaagactcggtctcaaaaaaaaaaaaaagtcaatagttccaaggttgagaaatcctgctctagaccagcacatcctgtaaaaatacacaatggacctcgttcctggcattcttctccgcaggaggaaatctccattgattgaggtatctatttgcagtcctattctgatcacatcctattcaccctgttggtgaagaagggatccctgccctaaaaagtacaagacaatcaaatagcccacactggacagatgagattgacagcaatttgttcgatgcatatattcagagcctgagagaggacatcatacatcacgcaggggcacaaggggattgcatttaagaacagcatgaacaagcaggggtatgggaggcaggctttacagtaataacaaggtgaggtgttccctggttcctgcagtggtatgtgattggcttgtttgaataattccataggctagcagggaggtgaaacccattaggttgaggacgacgaggggtgtaactggtctagctcataggagaactagctgggtaggaagcctttcccgctgggtgtgggcatatcgggtaagagcaggggaactcatggttaggcctttagggtcttgacaaagttgtcaaggcacacatgaaagtttaggccttatcttataaggcccaattacatccctacccaatccacctaaaagccttacatagtatagggtctcaacatacataaaaactaaggtcagtcaacactaaatcctatcctatatacttgaaaaactcagatctgtggagaagtttagagttttccctataagcagtcagataagaccaaattctctctttcatcaaatcacagatcttaaggaaagctcaaaatagggacctcccacttaacatcagtaatccattcctgaaaatcagacattctaacgattaaccaggtacctattttcccatcattttatttactttctttccttccttcctccttctttctttctttgctttctttcctttttctttttctttttttttttttttttttttttttttttgacagggtctcactctgttgcccaggctgttgcctaggctggagtgcagtgatgtgatcacagctcactgcaacattgaattcctggcctcaagcaatggcctcccaaaggagggattacaggcgtgagccactacacacggcctcccattatgtgaaatcagagcattataatgagttatatgtcaattccatccctccaactagctttgcacattttcctccaatatagaactatgggacacagtgggtcagtacacacacaacatctttgcttttagtattttaatcatctcttttactaaattcatttttctcatttgcttggtttctttctccacaattttcttcaatacttttccaatcttttaggaactcattttacactagacaaaaatgagggctatatgtgaagcacagtatggaaaagtgtttccaacaagaacgtgatagcgggaacggctgacactcaggatggtgctctgttacctcctcagtcactagcagcaccaggtacacacatgcccttgaatgatagttatacacatttcaaaacatctgcagatggttccattggtctaacaactgtatttgggatataacaagatttttcctggatgttatttttgttttttaaaaaaaagcattgtattggatcaggtgcggtggatcacacctataatgccaatactttgggaggctaaagtgggagaatcacttgagcccaggagtttgagttcagcttaggcaacatagtgggaccccatctctacaaaaaattttaaaaattagccaagagtggtggcacgtgcctgtagtccccagtactcaggaggctgaggtgggaggatcacctgagcctgggaggtcggggctgcagttagttgggatcataccaccgcattccggcctgggtgactgagtgagaccttctgtcaaaaaaaaaaaaaggctgggtgtcatggtggatggtggctcatgcctgtaatctcagcactttgggaggtcgaggcaggtggatcacttgaggtcaggagtttgagaccagcctggccgacatggtgaaaccccgtctctacaaaaaaaaacacaaaaaatagctgggagtggtggtgggcgcctgtaactccaggtactcagaaggctgaggcaggagaatcgcttgaacccagaaagcggaggttgcagtgagccgagatcctgccactgcactccagcctgggcgacagagcgagactctgtctcaaaaaaaaaaaattgtattgaactatatgattccacttgaacaaagttcttgttttgttttgtctttttgagatagggtctggctctgtcatccaggctggagtgcaatggtgcgatctcggttcactgtaacctccacctcccgagctctagtcattcgcccacctcagcctcctgagtagctgcgtctataggtgtgccaccatgcccagctaggttttgtattttttgtagagacacggttttgccttgttgcccgggatggtctggaactcctgagcttaagcgatctgcccacctcagcctccccaagtactgggattacaggcatgagccaccacacctgccccacttgaacaaggttccaaaaataagcaaaattacattatagtgttcgacatcaagacagtggttaccctgggcagtaggtgggtggggagtgactgaaagcatctgaggtgatttcctttcttgacctgatagcatagatgtactcaatttatgaaaattcatccagccatacacttatggtttgtatatttttttgtatatatgtcattcctccacaaaaaatttcaaaaacgttttaaaaatgtcatattgtggccaggtgcagtggctcatacctgtaatcttagcactctgggaggccgaggcaggcagatcacctgagatgaggagttcaagacaatcctgtccaacatggtgaaatcccatctctactaaaaatgcaaaaattagccaggtatggtggcgggcacctgtaatcccagctacttgggaggctgaggcaggagaattgcttgaacccagaaggtggaggttgcagtgagccgagatcatgccactgcactccagcctgggtgataagagtgaaactctgtctcaaaaaaaaaaaaaatgtcatattatgtattggggacacctattttttctatgtaaaactaagacaaaaagcactgtactgagaaaaatatactttttctggagtttaagttttaaaatgaaaagcggttccactggaagatgttaacaggaggacattctgcagagaatgccttcaattttctcaaggcatctcatttccgctttctcacagctattgacagaagattttgtaggtaggagatgctcaacattagtgggagaagagatagccacataggatactgggctatctgtcccaatcctcacaggagggaaaagaactggagtaggttcttttttttttgagatggtgtcttgctctgtcgccccagctggagtgcagtaacgcaatctcggctcactgcagcctctacctcccgggttccagcaattctcctgcctcagcctcctgggcgcctgccaccacactggctaatttttgtatttttagtagagacagggtttcaccatg[135 bp omitted]agtttcagaataaagaatgaatctatatacatgatacagaaattgacagtatttcgaaaaggacagagaaacattaacttacatgggccatggttttagaactgcaaaaactggtcagtccttttcaagatttctctgttggagaactatggagtcctgataagccagagctgaaagaagaaaaagaaaccatgaaataagctgcgccacagagctcccaaaatgatgtacatcataaatatgaaaacttttttctcttccattccttctcccaaactacttccattggcttttccaaagtaccacccaccactatgcccatccctatcctatacccacatataactggggaaaagtatagggagtctaaagagaaacaagctctggccgggcacggtggctctcgcctgtaatctcagcactttgggaggccaaggcagttggagcacctgaggtcgggagttcgagaccagcctgaccaacatgcagaaaccctgcctctactaaaaatacagaattagctgggcgtggtggcacatgcttgtaatcccagctactcgggaggctgaggcaggagaatcgcttgaacccaggaggcggaggttgcggtgagctgagattgcgccattacactccagcctgggcaacaagagcaaaaaagaaagaaatacaagctctgaagaaataggtgacaaatgatgaacttggtgtagaagcctagctacttctgcaagaggatttctgaccaggtcgccctctagcaatgtggatctggtccagacactggattactcagatttgttctgagcagctcctcctcactctaggacaacttttcaggactgagaagggccctgaatcctgcccctagaatcctgcctgaactacctaaacacagcaactaaaagaccacacagattgaacctggcagcttctgccaatgtgaggctacccttgccttccccagccaggaaagctcgccactccagttttccaatcagggcctcccataccatgacatccttcaccactccttctcttttattgattaatttttttttagatggaatttcactctgtcacccaggctggagtgcaatggcacgatctcagctcactgcaacctccatctcccgggttcaagtgattatcctgcctcagcctcctgagtacaggtacatgccaccacgcccagctaatttttatatttttatatttttagtagagacggggtttcgccatgttgaccaggcttgtcttgaactcctgacctcaggtgatccgcccgcctcggcctcccaaagggctgggattacaggcgtgagccaccgtgcccggccccactttccttttagtatccaagctggggacagaagggattcatgattcctgcagttggtcaacaatattcattgagaacctctatgtgttgggtacttcatacacattgtcagttgtcctcggtactgttctgcaatgtagtgctctccttttaatagctcaggaaactaatgcccaggggtcaaatcagttaagttgccaacatttgttttgaatctacatttctctaactaaaaagcccgtttcttttttctttttttggttttgttttttttgtttgtttttgcagacagagccttgttctgtcacccaggctgaactgcagtggcatgaccatggctcactgtaacctctgcctccagggttcaagcgtttctcctgcctcagtcttccaagtagctgggattacaggcgcctgccactacgcccggctaatttttatatttatagtagagacagggtttcaccatgttgcccaggctggtctcgaactcctgacctcaattgatccacccgcctcagcctcctaaaatgttgggattacaggcgtgagccaccacacccagcctaaaagccagtttctctttcaactcaggtatttgtctctgaagcaaggatttctacttcaccaggagaaatctgatcatcagcaattcactaaaaaaaagaggaataactaacagtaggttttgttttgttttgttttttcaaaaacacggtctcactctgttacccaggctggactacagtggcatgatcttggctcacagcagcctcgacctcccgggctcaagcaatcctcccacctcagattcccaagcagttgggactatagttgggcaccaccatgcccagctaataatctttcaaaaaatgctaaatctcagaagatagcaaaatagttctttccatctatggtccacctgcagaaacatcagtttgagcaattatccatcaacaaaaatgccttcacaatagctaaggcaaccaggtgagagatcgcagtactgggttgtagcacaataataagaaaagaagcattgaagagtgcaggaaggacggctcgacattacccatgtcacccctccccagctcaaggcagcacagtgtagacagaggtattgcccacttggggaaaagtcagggaagtgagcacagaactttgcctgttccctaacaccaggcccgccatagtaaaacccagcaacagggagactcccaaccccagactccaggccagtagccacagactgaccctctagacctgctctggcatcaggaaagatcatgcagcccaggcttcaggcttgcatgatgaactccatctccaggctgccaccaccatcaggctgacatcagaggccctgggctccaacagcccttagcaacaggcaagcctcagtggcctctgcaatcaggcacataacagtatggcaccagtcacagtggtctcaggctttgagcgtgccccagcactgcaccagccagagtggccctgggcttggggcatgctatgtgcaacaccagagaatgtggttccagccttttggagcatcccagcactatacccaccgtagcagccccagccttaaggaccaaaccagacaggctgcccagaaccactgcatgggctattgatgggctttcccagatgaacctcattctgcaaagactggaataaatacacagtcctttcaagtgtgcagacatcagtgcacggtcacaaagatcaacaacaatcagggaaacatgacatcgtcaataggacaacataaagtgccagtgattgactctaaagaaatggagatgtctgaactgcctgataaagaattaaaacaggctgggcacagtggctcacacttgtaatcccagcactttgggaggccgaggcaggcggatcacgaggtcaggagatcgagtccatcctggctaacacggtgaaaccccatctctactaaaaaatacaaaaaaattaggcgggcatgctggtgggtgcctgtagtccagctactcgggaggctgaggcaagagaatgccatgaacccaggaggcggagcttgaagtgagtcaaggtcgcgccactgcactccagcctgggcgacagagcgagactctgtctcaaaaaaaaggaaagaattcaaataactgttttaaggaagttcagtgaacttcaagaaatacagagaactttaaaaagtgagaaaaacaatatgtgatcagaatgagaaattaaatagattgaaataatttttaaaatcaaacataaattctggagctgaaaaatacaatgaaggaaattttgaaaatgcaagacagaacatcaacagcagaattgaccaagcagaggaatgaatctgtaaacctgaagacaagttatctaaaaatatacagttggatggaaaaaaggatgaaaagaaatgcagaaagtttataggattcatgggacagcatcaaaatagcaaatatttgagcagtaggagttaaaaagggagaagagaaagataaacaagtagaaagcttatttaaagaaataacagcaggcacagaggctcatgcctataatcccagcactttgggaggccaaggtgggattacttgagtccaggagtttgaaaccagcctgggcaacatagcgagactcatctctacaaataattttttaaaaataagccaggtattgttgcatgtgcctgtagttccagctacatgggcggctgaagcagaaggatcacttggacccagaagttcaaggttgcagtgagctatgatcatgccactacactccagcctgggcaacagagtgagatgaaaggaaaggaagggagataagaaggaaggagggatggagggagggagggagggaaggagggaaggaaggaaggaaggagaaagaaagaaaaaagagaggaaagaaagaaaaagaagaaaggaagggagggaggtagggaggaaaggaggaaggaaggaaggaagaaaggaaggaaggaaggaaggaaaaaagaaagaggaaagagaaaaaaagagtagcaaaaaactttccaaacctggggaaaggtaagtatccaggtatggcccaaagttagaaggaagaaaataataaagattagggcagaaataaatgacacagaccagaaagccaatagaaagaatcaataaaattaagagttttttttttgaaaaaagaaaaaacccacaaaattgacaaacctaactaagctatactaaccaagagaaaacagaaaatattgaaaatattcaaataaaactagaaatgaaaaaggagacattacaactgatacaacagaaatagaagagactattatgaacaaacatacaccagaaaattggataacctaaaataaatgattaattccctgacacatacaacctaccaagattgaattatgaagaaataaaaaatctgaacaggctgggcatggtggctcatgcctgtaaccccaacattttgggaagccagtcattatgacaaacagtatggagaggcctcaaaaaactaaaaatagaactaccatatgatctagcaatcacactactgtatatatccaaaggaaatgaaatcagaatgtcaaagagatctctgcactttcatgtttattatagcattattcacgatggccaacacatggtgtccatcaatggatgaatggacaaagaaaatctgctatgtaaataaaatgtaataccattcagctatgataaagaaacaaaacctgtcatttgtgacaacacagatgaatctggaaggacgttatgttaagtgaaataagccagaaacagaaagataaacaccac[137 bp omitted]catggagaaaccctgtctctactaaaaatacaaaattagccgggcatggtagcacacgcctgtaatcccagttactcaggaggctgaggcaagataatcacttgaacccgggaggcggaggttgtggtgagccgagatggcgtcattgcactccagcctgggcaacaagagcaaaactccgtctcaaaaaaaaaaaacaaaaaaacaaccaaacaaacaaacaaacaaaaacaacttaatctcatagaagtagagagtagaatggtagttaccagaatctggggtagttgggggtggggggaaatggcaaggttgaggagatgttggtcaaacgatacaaaatttcagttacataggaggaataagttcaagagatctattatacaacatggtgatatagttaacaatatattgtattactgaaaaaagctaagacctgtaaagtgttctcaccacaaaaatggtaactatgtaaaaggtaattcatatgttaattagctagatttagacattccacaatgtatatatactttaaaacaccatgatgtacatgataaatacatgtaattttatctgtcaaaaaataattttaatactaaagctcggtattaagaaaatgaccagcctgggcaacatagtgagaccttgtctctacaaaaaaattttaaaaattagccgggcatggtagcgtgcacctgtagtctcagctaccaggaggttgaagcaggaggatggcttgagcctgggaagcagaggttgcagtgagctgagatgatgccactgcactcaagcctgggcaacagagtaagaccccatctcaaaaaaaaaaaaaaagaaaaaaatgaaagaaaaaagaacagaaaaaaatgaaagaaaaaagaaaagaaaaaaatgaaagttaaagcaaacaaaatgtacctttttacaatgactgcattgcaagacctaaaagactgatgatgccctatagtagcaaggttgtggggacaccgacactaggtcggtccacatttagagctatgtgaagcagcatttcaatcctgtaaactctgaatcagaagctccacttctgacactaaagggactgtatctgtacataaagattatgcagagctatggccggggcagtggctcacacctgtaatcccagcactttgggaggccaagacaggcggatcacctgaggtcaggagttcaagaccagcctggccaacatggtgaaaccctctctctacaaaaatacaaaaattagccgggcatgatggcaggtgcctgtaatcccagctactcgggaggctggggcagaagaatcgcttgaacccaggagacggaggttgcaatgagccgatgtcgtgccgttgcactccagcctgggtgacagagggagactctgtctcaaaaaaaaaaaaaaaaaagaaaagaaaaaagattatgcagagctatgctgacagcatggtttataatgaattaatggattaaagttgaaaagaacctaatttcggaatgattcaataacctgttgtttatccataccattgaaaatgatgcaaccattaaaaatgatgttgccttaattttgaatgggtgaagccagtgtgttaaaaaaagaaaataccagcatgtgtagtgtgaaactattttgacagaaaaaaaaatcatgtttccctagcaggaccagttaaaatgtttacagtcacagccagcaacacgcaccaccacattaaacagagtgtgagcctgaaatacccaaatacttcaaataagactttcccggctcaagttctttcagtcttccttttaactgagaaaaaaagctaaggatactgtaaaaacagatgctgttttttctgagtggcttttttttttacttcggcttctcattcatgaaccaactctatgatttaatttgcccatgtgtgttggagtacggcctagaaaagaatggcaaaaagtctctgactgatgtcttctaagcactgaaggcagccccatgctgcttcctttcacatcttcctgataaacaggtttattttgcttctgaaccagttcttttggctaagatgcctatgaagccctccagcagatgttgggtctccttgaccaactggtctcactttgcatataacatcattaaaataaaaactgtaaggcatacatctgtatgaaacccagttacctccataaagaccctgtagcttcagtataatctggacaaaacttgacagtgtgtgccatcatgagattgatatctcttcccttcatcgtgagattgctgaataaagcaggaaggaatttttttttttttttttttttgagacaaggtcttgctttgccacccaggctggagtgcagtagcacgatctcggctcaccacaacttccacctcctgggttcaagcgattctcctgcctcagcctcccgagtagctgggattacaggcgcatgccaccacacccagctaatttttgtattttcttttttttttttttttgagacggagtcgtgcccaggctggagtgcagtggtgcgacctcggctcactgcaagctccgcctcccgggttcacgccattctcctgcctcagcctcccgagtagctgggactacaggtgcccgccaccatgcccgggtaattttttgtatttttagtagagatggggtttcaccg[140 bp omitted]ccaggttggtcttaaactcctgacctcgggtaatgcacctgccttggcctcccaaagtgctgagattacagacatgagccaccgcgcccggccagatttttttttttaagtatgcataatgatgatatttggtatactgttgtaattaccaatatatgcttttatttttctgcatgatattagacaggttactttccagttccccatatgaaatggtgagaactacagtttctacctgaaaggattgttatgagaaataaataagatactacatataaggcacttagagtagtaaataagcatttcataaaagtcagctatattaataaagatgaagaatactacatatgcttcttcccacaattatttttaaaattctactcaggcctgtaatcccagcactttgggaggccaacacaggcggatcacttagatcaggagttcaagaccagcctggccaacatagtgaaaccccatctctactaaaaatataaaaattagccaggcatggtgatgcatgcctgtaaccccagctacttgggaggctgaggtaggagaatggtttgaacctggggcgggtggctgcagtgagccaagatcgtgccaccgcactccagcctgggtgacagagcaaaactctgtctcaaaaaaaaagaaaaaaaaaaaattcttcgcagccctgctcttgataggcaatccttcttgattatcaacaatttacaaaaggagggtacaaagataaaacaaatgtggtaggataccaatttttggatctgggtgatgaggaaaaatattaaattacaacctaacggtaacaaatctactgtgcacttattatgtgccaagcattagctaagggttttgcatatattaattcctctactcagagccatcctatatagcagggtctatcattatcctcattttgcagatgatgaaactgtggcacaaagagattaaataaattgccccaagctcaggcagctttaagtggcaggttgaggactagaacccccctactttagctccataacccatacgactgtcactgtactaaactgcatctcatgagacctgataaatacgtggcctgaaacactcatgctgtcaaaaacttcaagccactttccaaatttctactgtcttcccttcccttctaataaccccttcccttgttaacacagacctctccactaaaaaccccatcgtattgtcactccttaaaagcctcaaaagcagaaaagatcctgtcgccaatcaaaccacctcctttccctgcttttgaactcagggcggtggggatcaaagagacctagtgggtaattccatctaaactgtaaactcctcaactaatcaccatcgaatgaaagttctacgtggtggctcacgcctgtaatctcaacactttgggaggctgaggtggaagaattccttgactccaggagttcaagatcagcctgtgcaacataaggagacctcatttctacaaaaaaatttaaaaattgcgcgtgggaccacgtgcctgtggtctcagctactcaagaggctgaggtggaaggatcgcttgagccagggaggtccaggctgcagggagcgagatcacttcactgcactccagcctgagggacagagtgagaccctgtctctaaaaaaaaaaaaaaaacttaagtaacaaaataaagctctgcagttagcttctcttcaggaggtttacttccagaccatccaaatgattagaaagaggcagctcataagagaaactaaattactgccaaatgctcatgtcaatacctactggaggccgggtgcggtggctcatccctgtagttctagctacttggcaggctgaagcaggagaatcctgcttgaacccgggaggcggaggtttcagtgagcacatcgtgccactgcactccagcctgggtaacagacccagactccatctcaaaaaatacaaaaaaaaacaaaacaaaacaaacctactggaaaggggtaggaattggaatctaccttcatcaccccatcattcactgggaaggaaggccaaagcaccaggtcagtggacaggacatttcaggggttaaagtctaactagctgaagattaactggaacaagcccgcatagtctgacaaaatcatatctattgactggcagaaagggagaaaattccacaggaagggttggaatagaatggacgagagagacgagaaaagctctttcgtaaacggttgagttccagctgaaagattctaaggaggatctaatgacagctgcaatctggaatggctgctgtttccgaggtgagattaggagaggcagggattaatgagatattgaatgcaatcatgagtgtaatcaagagggtatccccagtaataaaatgaaaacagcaaagcaagtctagaacatcactggtaagaaaactgtaatctctcaaagagggagtcattatgccattttacaactactgcaccacctggggagaaatcatgttttctattaattttgcaactggctttatctgtctcttccttcctagcctgattaatgacagagctgcttcattgttcagtccgagctgattttcattccacagaagaggaaagcaaatgcccccacgcccagaaaaaataaaaattacacttcatggaacaaaacggaaacacaaactcatctggatgttgacttgtctatatgcaacagcaatcatttcctcctctccccgctgccttcctaaagaacagcaggattgggaaaggagacgggaatcttgagaccgcgggcctttcctggagccggccttggctgagcaggacacacccccgctagcgcacttgctccctccgtctactgcgcgcaaaacccgatggaaataacagggagcctggaataaagctgaccctttcccgtatcagagcgaaaggccaggtacacgaagacggggctgggatctgtctccgagttccccgcagtttccatgggagggagctcgggtaaagctgtgcaatctgcagttcttcagactgcgtctttttgtttgggggccttcattcactccggggttcctgtatctaactcggagccattccgggccgctggacctgggcggctctgaagcgagaaggcagaggacgcaacagggcacccggcgcccagtcagcgccacaaactccacagctactgcctcctggctcacactgaggtctgcgccgcccccgcgccacccccgcgcccattgcctcggtgcaagcgaccaactcacctctcggagccgacaccagcagcgaagccggaaagaactgcgagcggaggcctgtgggaaatgtagtccgccgatgggagggactggttccagccccaacgggctgcgcggagtgcgcatgcgcgggggccggagccccgggtgcgctcggggcgggaaggccctccgcgctgcgtggggctgaggcgagctcgggcttgcgtttgcttttgtcgctgaggaagacttttatttgtttattttcttgagacagggtcttactctgtcgcccaggctggagtgcagtggcgtgattagagctcactgcagccgcgacctcccgggctcaagcgaccctcccacccgagcctccagagtagctgggactgcaggcgcgcgccaccacgcccaactcattttttaagtttttatagagaccagatctccctatgttacccaagccggtgtcgaactcctgggcttaaaagatcctcccgcctgagcctcccaaagtgctgggactacaggcgtgagccaccaggctcagccgcggaggatttagaaagaagttttggcaccagcagatgcctaatatgtgtactaaacacctaccagttactcactgcatacacccaagcaaggtgtgggcacacatcaggcatgcaatgaaaatactctcaaagcccaccagaacctggagcaggacgtaaacctagaaaggtcgctcgtgctcactgccctctccctttctcccactctgtctctgtctctgtgtgtgtgtgtgtgtgtgtgtgtgtgtgtgtgtgtgtgtgtgtctcgtatctcctgcagttgtgaatgtattgttctactaaaaatacaaaaaattagccgggcgtggtcgcgcgcgcctgtaatcccagctactcaggaggctgaggcaggaaaatcgcttgaacccgggaagcggaggttgcattgagctgagatccgccattgcaccccagcttgggcaacaagagcgaaactccgtttcaaaagaaaaagactaactggagaggtctgtctccaatgagactgaatttgtcctgtcctgcgttccttcaggaaagaaatgggataagcccaccagggaccaccctgaggcatcttctgtatcccaaattctttgatatattagttaatacatgaaagaatttgttctttccttaagaatataaaactttagaagatatttgaaaatgcctcggcaatctggtttcattttgcaaacaataggatatgcatgaaataggagataaatgaaaaatctgagctactttataactactaagaaggtggccagacgcggtggctgacgcctataatcccatcactttcggggggccgaggcgggtggatcacctgaggtcaggggtttgagaccagcctggccaacatggtgaaaccccgtctctactaaaaatacaaaaaaatttagctgggcatggtgacgcacacctgtagtcccagctactcgggaggctgaggcagaagaatcgcttgaaccagggagacggaggttgcagtgagccaagatcgtgcagctgcactccagcctgggcgacagagcaagacgccgtatcaaaacaaaaacgaaaacaaaacaaaacaaaaaaaactactaagaaggccgaaggcccaaagtatttttttaattcaaaatcacggtcctatgtacatgtttacaattaaatttatgtaaggaaatcaacactccattaaaaaaacaataaaaagaattattaaaatagctcctccatattctctgttttgactaagtttttttttttttgaaacaaagtcttgttctgtcaccctacctggagtgtggtggcacaatactgtctcactgcaacctcagcctcccaggttcaagggattctcctgcctcagcctcctgagtagctgaaatgacaggtgcccaccaccacgcccagctaattttttgtatttttagtggagacggggtttcac[131 bp omitted]cactaggggctaaattcttcacaccctctctggtgaggagactgctggtgaagataactaactgtaggtcattttccttgtccaacagccccagagaattaacgcctgacttcactgaggtacgatggagggatttttggaaagggccctgctctgctctgtgtcaaatgatggggcacttggtccaatatcatgctcactgaccttctgaaataggattttcttcagattgtttctcatgtcgtttagtttgaaaaaagcgatttggaccttcaattcatcataatcatgcagaataagagcatttctttcagagagtttcatttcttttcttagtatctaaatctgtactattaatattttcagttgcctctcagacatccgcagtttctcttagtaggaaaaaaaaaaaaaaacccacgtgtcaaatgctccatcatttgacacagagcagtgtcctttgtaaaaaacccttccattgtacctctaaaacctgtcattcta[131 bp omitted]ggggaaatcccgactctacaaaaaaatacaaaaattagccaggcatggtgatgcacatctgtaattccaactactcaatttttttcatatatatatatatatatatatacacacacacacatatatatcatatgtatatgattttagtaactttgaaatcataaaaactaaagatgcctcagcaggaattaaatccatgttatttctcaatatatttctggagtcttcatttattccaaaactatatcttgtggatgtacttcacattaagtttgcagattgagaaagtggcccaacatataccaaaccttgtgttttaatcatttgtggtaatatcgtataatttatgacctcaacttttgttaaataccttcatggcaaaggcactatcagaagctgctgcaaaacctcacaccatcagcactggtgaaggagaaagccgttgctttctgctttcttctgtcttcctaatcttgcatgagtttatctcactggaagaacatagatcacatctggaattctagaggcaagagggtctaaaaattgtagtgctgaggcttccagcctctgtagcacaaaaaagagcatggggcacagaagaatacttataacaaaacaacaacaacaaatgatatccagcacacttggttttttaaacaattttttatttttattttttagagatgaagtttcatctcgtcacccaggctggagtgcaatggcgcaatctcaactcactgcaacctctgcctcccaggttcaagcgattcttctgcctcagcctcccaagtagctgggactacaggtgcgtgccaccatgcctggctaattttttttttttttttttttgtatttttagtagagacggggtttcactatgttggccaggctggtctcgaactcctgacttcaggtgatccacccacctcggcctcccaaagttctgggattacagatgtgagccactgtgcccagccggttttttaaacaatttaatatcatcatttaaaatttggcttttttctcaaaatttctcaaaaaaaaaaagaaaaaaaatttgttttgctaccccaatgctagaaagatactctacattttctcctgaagcccttcttgctttaccttttacgattagatcactcatgcatctggaattgatttatgtatagtgtgaggtaagggtcaagacgaattttttatcaaaacagatacacaactgatccagtgctttttattgaaaagaccaccatttcccaaccacatggccgaggaaactttatcacaaattagacaaccacatatatatagagagagagatctacttcagggctctttattttgttccattggtctatttgttcattcttgctcatcgaacattctggttcattctaacatacctgccttaatgactacagtacaacttgtcacattaacaaactcaaggagaaaaacatcatatcaatgagccaaaaaggcatctgactatatttagcagatatttctaataaaaaaaaaagttaaacaagaactgagacaactgagctacaaaatctatttatctcagacctagagtaaacattacaccaagtaattttcattaaattggagaaaatgaccagatgcctggtatcaccatgaatactaaaccttgttttggagactctattacaataacaataatttaaaaaataatcactatatttagaaaaaaacaaaattatatctatttgcagttgacacacctgattgcctagaaaaccaagagtctagtaaaaaataaaatttaaaagattattaggtaataatgaaagctatgattgtatccacatttaacgtattcatatgacaatatcaacataaatacaatatgggagaaggtaagtccatttataacaaaggactactatctagaattttattttttaagaatcttataattcttatattttaaaagcttttttaaaggaacacaggcaaagacataaattggcaagttacagcgtttagccaatattcagatgtgaaaatatgcccaattcactattaaccaggaaaatattactatgcataccagaagtaaggatataaggaaataaggaaaacatatttcactggttgaagggattgtgcactgggagcatactgatgctctctacttctatgacagtatctagtgaggttgaaagtaaatattaactatgactgagcaatcctacttttgataaataccttagagaaactcttgcttatgtacagtaataaacacagacctattcaataaggtatttttcacagtgagaaaatgcttatcacctaaatattgatcaataagaaagtttaaatacatataatgtatatataaaagataggactagtgggctttctattctattgaaaagtatcattcaaaaaaagcaagcagctggttacaaagcatgatgggagttgctttcctcaccataccagtaatcatacatctgccataatgctgacattttcatcttcgaagtccttttggttatcgcagcatctgccaaagtagaatcacatctgcaataggtattgggaatgggagttctatggtgaagtctgaattacactgagttaaataaaataaaactccattttctttcatattgataggcacataatgtgactttttcccccaagaaatatagtacacagagctctcatacatgtttcacaaaatcatttccttcaagtaggattaagtactagtgttctgtggaacatagtttcagaaattttgagtaaaggtactgtctccagaagacctctgttaatgtgaaaatgttacctaagaggagaaacacattgtcctattagcaaaacctaattttattatagcacttaaaatagtcttcttcatgttacattttactgtttacaaattaaaaaccatgtgaaatcttgggtggacaagatgtattattctagatgattaatgactaattaatgacatctgcccaatctgagcaaactggacttggaggtacaaatcttaatctatgaatagagtgacattacagagatttggttaaaaataaagagttgtggcaatacttacttttattttgtggaaggtgctgtggtttgaatgtgtcccccaaagttcatttccaagtttttgggagaaacttgatccccaatgcaacaatattaagaggtgggactgttaagaggtgattaggccatgaggagtctgcccttaggaatggattaatgttgttaccacaggaatgggtttgttatcacgtgagtgggtttcttataaaagggtgagtttggccccttttgctggcttgctctctctctcaccccctttgcccttccgccatgagatgacacagcaagaggccactcataagatgtcagcctgtcaatcttgggcttctcagtctccagaaccatgagtcaataaatttctgtttgctgtggattactgagtctgtagtattctgttatagcaacacaaaacagactaagacagaaaattggtactggaaaagtacgcagttgctataatgaataactgaaagtgtggaagtggctttggaactaggtaatgggtaagagctgaaaaagttttgaactggatgtcagaaaaagactattgctgtgggtggaatgttaaagggtgattctggtgagggctcagaagagctgtatggaaagtctgaaactttttagagattacttcagtggttgtgatcagaatgttgataaatatagggatggcaaaggcaattctggtgaggtctcagctggaaatgagaaacaaggtattggaaactggaataaaggccatccttattagaaattaacaaagaatctggctgaatttgtgtccatgccttgggctttattggaaggcagaatttaagagcaatgaactaatatgtggtggaagaaatttctaaggaaaatactgaaagagctacatggcttcttttaactgcatatagtaagatgtgagaggtagaaatgatttaaagataaaacataattaaaaggaaggcagaacaaaaagatatggaaaatttgcagcctggccatttatgaagtgaaaaggtgtgtttaggagtgcaaaccaaggttgtatacccagagactgctgaaaagattagtatgaatagaaggaagacaggagctatcaagacagtgggagaatgaccctgaaggcattctggcgctctttgaggctgccccttccatcacagacagcattcactggctcatgctgcctcatgactctgcttcccacatgccagtagagtgcccttggctgccccagccattggttcctgctggctcaggtgtggctcagcctgccactgggcataagctgtaagcttgtggtggcagcatcaatgtggtgctaatttggcaggagtgcagaatgcaagagtcacgggggcatggcttccttcacttagatttcaaaggatgccttgggtagcctgggggcccagtcagatttgtccatgagcagaaccactgcagagagtccccactaggacagtgcctaatggagagaggccatccccaagaccccagaactgaagacctaccagtgtaaaactccaacctgtgacagatgctctatggcataagcccagcaaagccatgggggcaaggctgtctgagaaccagcccccaccccagtgtgtccaagtaggtcatagagttaaggaagggtcttctggagccttaagagttaatgttgtttggctgggtgcgctggctcacgcctgtaatcccagcactttggaggccgaggcaggtggatcacctgaggtcaggagttcaagaccagcctggccaacatggtgaaaccccatctctactaaaaatacaaaaattagctgggcatggtggcagatgctgtaatcccagctactcgggaggctgaggcaggagaatcgcttgaatctggagacagaggttgcagtgggccgagatcacgccattgcactccagcctgggtgacagagcgagactccgtctcaaaaaaaagagttaatgttgtttgcactgttgggttttggacctacttgggaccagttatcccctttttcttccctatttctttcagaataggaatgtctaggctatgcctgtcccactgttgtgttttgggagtaaatatcttgcttgatttcatagactaacagctggaggaaaatttgcctcaggataaatcatgccttgtctcacaatagctgatctagatgagattgaacttctgagtttgtgcttgaaagagttaagactttggggcaatcagaatggagtgtatgtattttgcatgtgagaagaacatgaatttgggaggccagagaagccacgctatagtttgaatgtgtcccccaatgctcacccccaagttttagggaaaaacttgatccccaatgcaatagtattaagaggtgggacctttaagaagtgattggtccatgaggactctgctttcatgaatggattaatgccattatcacaggagtgggttctttatcaaaagatgagttgggctccctcttgccctctctctctcttatcctctctgcccttctgccataagatgacgcagcaagaaggtccttatcagatgccagcctcttaatgttggaattcctacccttcagaactgcgagccaatttctgttcattgtaaattacccagtctgtggtattctttcctttttcttgagatggagttttgctcctgttgcccaggctggagtgcaatggtgcaatctcagctcactgcaacctccacctcccaggttcaagcaattctttctcagcctcccaagtagctgggattacaggcatgcgccaccatgcctggctaattttgtatttttagtagagatggggtttcgccatgttggccaggctggtctcaaactcctaacctcaagtgatccacccgcctcagcctcccaaagtgctgggattccaggcgtgagccatcacacccagccagtattcttttataggaacacaaaacagactaagaaaaaaggtaataatttttgtgttgaattcctatttttatatgtattgttcattccttttgtaaagtcaatgaaactaagataaatgagaatagaaaccatctaaaagatactgtgactgaatcatgtcattttttgtaacattgttgcattgttcaagtcaggaaacctaaaatctggatacatatttaaatgagaacaggccaggccccagggtattcctagtaaatcattttatgttttataattgttttaattgactattgagttcaatttactgatacttttttgcgaatgtttgcatatatcttaagtaaaattggcccacattttgctttttaggaggtatttatcctcatctaattttatattgggatatttgccttatataacgatctagtaaaattttgttatgggttatatattctttaaagctttttactgcctgtaaatctatagattctagtttttaaaaaacaagatcataactgtacatattttcccctttatggattagttcagggtttttttttggtatctggggtcaactttgatcatttaggtttctctagattgaaacatattgaaatatatgtatatagtaatactgaaacattgaaatatatgtatatagtaatatgtaacttaaatttttaaaaaaacctcattatgtagctatttcactttttccatacataaagctgtgagtcatgtttttccctcaataactgccaattctatattaatgttcttttcaaagagaatatccttagtctgttattttattaactattccattaatttatttgatcatataaactacttgctgttattcaccttagtttttaaaaatttctagcttaagttaatccttattttttcccataaattgcctgttatgtgacaggcactgtaggtgtgtgaacagaatggtgaacaacacaaatacttatttctcaatccagatgttctaaatgcattgctttaaattttctaccaagtagagctttggttggtgatttcccccaagttatctgtaggcaacatgtgatcattcatcactaaatagtctacaatttcagacttgattttctttctttttttttttttttgagatggagtctcactctattgccaggctggagtgcagtggtgtgatctcagctcactgcaacctccgcctcctgggttcaagcgattttcctgcctcagcctcccgagtagctgggactacaggcgtgccaccatgtccagctaatttttgtatttttagtagagacagagtttcaccatgttggccaggatggtcttgatctcctggcctcaaatgatccacccaccttggcctcccaaagtactgcgattacaggcatgagccaccacgcctggcccaaacttgattttctactttaaaaaactttattatggaaaatttaaaatatatgtaaagatagtaagaacggcacaatgaaccctgtgtacctaatgatccagattaaacatttaccaacattttgctaatcttgtttcatctatccctcccaccttttgtttttaagtatttaaaagtaaatcacaggcataacatttcagccttaaatacctcagtatgaatctctaacacttaaggactcatacacatatacccataatgccatagtcatgcctaacatatgaacaataaattatttcgtatcatttagtaaccaatccatgtttacatttgtacaatatgtagagacattttattccttcaaatcttgtattgactatgttttctttattttctgtattcctgatgctctggccacttggggccttgatcctggataggctgcccctcccagggcaagctaatgcatagatgataaactccactgcaagcatgcctttcatatacaaaccaaccaatccagagcccatactcccaactatctcctttaccaaactctcatacaccaattcaatattcccctgccctaactagacaattacgaatcccccctagatcccagagaccaacaaaattactcaaactattcaatcctaagcttaccagtgtgcctacccctgccttgtccattccttcccatgaaaacccccaataaaagctctgggccatgctgtgctctcaccctctgcctcctgatacacccaggtgcttctttacgtgaccctgcatgccatgccatgcctcccgtttgtgggatctgcgtataaacttcttccttcatgacaataatttccatgtctgcctgtctcaccatgattgattaaaacaaatcccaagcgcattttaacacaaggatcctaaaatgctccatacactgtatttgaaggatacgtttcttagtctcctttaaagtgtaggattccatttttgtcttttttttttttttttttgacatgtattggttaaaaaactaggccattacttctgcagaatttcccaaattgtgcatttggttgtttgcttctttgtgttgttaatttgttcttttattccccatgtttcctgtaaactggtaattaggtttggagactaacttgtacttctcagttttgggggagccaagaaaacttcacaggtgtccactgtgtgtatccatttcatcacatcaagttcatctggctgatctcatttagagatgttaatatagattagtgtcctgtcattctgctccatgcattataagcttcctatccatttttcacctaatggtcttcgcatccattgctatcaccacgaaaatccatgattttgtaaaattaaagagcgtagttttcaaattctatcattcatttgatctttgttttgttttgttttttgttttttgtttgagacagagtctcggtctgtcacccaggctggagtgcagtggcgcgatctcggctcactgcaagctccgcctcccgggttcaagccattctcctgcctcagcctcctgagtagctgggactacaggcgcctgccaccacgcccggcgaattttttgtatttttagtagagatggggtttcaccgtgttagccaggatggtcttgatctcctgacctcacgatccacctgcctcggcctcccaaagtgctgggattacaggcttgagccaccgcgcctggcctcctttgaccttttaaccagttggaattctctaatcaacaactttccttcaccaacttttggttgtcttgaaatatagtttgtaaaggataggcaaggtaaatattccattcttttcctttatttgttaataatgctctagtatgctccataactaatcaatgcatttggttcaggaaaaaaaaaagctcaaaggttggagtggtcatgataaaaggacacaggagccaatttgaggggattgcctcaaaatgctaaattgacaatttagcatttttaaaaaacaatgaagtagtttaaaaaattaatggggcttcataatacaggtgacttttaatttccaaagtttcatgttatcctttgtcaatttttaatattgactggggccagagaatactgattgtagtttttttttttttttgagacagggtcttgcagtcactcaagctggagtgcagtggtacaatcacagctcactgaagcctcaactcttgggttcaaatgatcctcccacctcagcctcgagtagctaggactacaggcatgcaccattatgcccagctaatttttaaagttttttggtagagacagggtctcaccatgttgcccaggctggtctcgaacttctggcctcaagcaatcgtccttacttggcctcccaaagtgctggatttacaggcatgggccacctcacctggtctagggtatctgttttttaatgaacaaactggaaaggaattccttactttcaatattttaacgagaataagatatctcaagttcaatgaagattaaatgttggtggaaggcatttctatactcattatgcccacagcctttagtatgaattatgtaaaaataaatatttagtatgataataaaagaaagtttagtggcttaaaacaacaaccattttattatatctcatgtttttgtgggtcagaaatttgggccaggggctcagctggtcaattcttccattctacatggcatcagttcaggttaccaagtcgctcactggcatttagctggtggctggtctggtggatccaaaatttcactcaaatgtctggtatcttggtggatgtcaagaagacagggttcagcaggtgcctctccctctctacgtagtttcagggcctcttcatgtggtctcttcagcaaagtagccagactttgtaacaagacagttctgtcatttcatgagatgaagtaaccctaccagtaaagtctgagtcaagaaaccagcacagcagtacgtctaccatattctactgggcgaagcagtcacagagggatgtagattcctgtatacaacagagggatgtagattccacctcttgattgaaagtgtgtcaaactgctgcactcttatatgaccatgtcataaattaaaaaattatagcacagagcagttaagcgtcttgtccagtatgacacaaagtgatgggatagggatgacggtaaatgtctttttcattcttataacaggattagtttttagaacaaatatgctgaagtttcaggtttgagtgatgatggactacaatacattgtcacactcttttaatggtataaaacctctaatgccaacgcagttgcatgtatggagcaaaatagattaattactacattcatagaatgttctataacacagaagttgaaaagactttcttagatttttacattatgaattttcagatgatgagtaaggtgtgaatgttgcctaaaggccttcttacattccttacattcatagggtttctcaccagaatgaattctcagatgttgaataagggatgaattaagtctaaaggccttcctacattccttacactcaaagggtttttcgccagtatgaatgctctgatgtagagtaagtttttggcgcaatctaaaggccttgccacattccttacatttataaggtttctcaccaatatgaatactctgatgctgtgtgagttgtgaaagtagtctgaaggccttcccgcattccttacagtcatagggcttaacaccaatatgaatactctgatgtgaaataagttgtgagtagcgactaaaggctttccagcattccttacattcgtaaggtttttcaccagtatgaattctgtgatggagaataagatgataaccacggctaaaggtctttccacattccttacattcatagggtttctcaccagtatgaattctctgatggagtgttagttgttgtcgcactctaaaggccttcccgcattccttacattcatagggtttctcaccagtatgaagtttgtgatgtactctaagaccagagccacacaaaaaggccttcccacattctttgcattcatagagcctgtcagcactattaagcttctgatgccgagtcaggtgtgcgtactgtctaaaggcttttccacactctttacacacatagggtttctcaccagtatgaatcctctgatgcagagtaagttgtcctcgtaccctaaaagccttcccacattctttacattcatagggcttctcaccaatatgcattttctgatgtactctaagatctgcaccacatatgaaagcttccccacattccttacattcatagagtttttcaccagaatgaagtctctgatgtcgagtaaggtgtgcagtctgtctgaaggccatcccacattccttacattcatacggtttttcaccagtatgaattctgtgatgaaaagtaagctgttggcgcactctgaacgccttcccacattccttacattcatagggtttatcaacaaaatgaagtctctgatgtggagtaacagatgtgcgtttctggtaagaggacaccttttcagatggcattttcacactactgaagtatccttcttgaggtctctcctgtccttcaatttttcctgtggattcccaatcattttttaaaatgagacccttaaggccatggttttcaattctttccattatcttccactgggataaatttatttcataaatgtcattttctaaagataacttcttggtctcatacttggtctccaaatctaaaataaaacaagaaagcaaacacatgctgttttcttttactaaaagaagcaacatttctaatgtagaaataaaagacaacaaaagtaatccttaaccaaaactctaaaatattgttatacaatttggaaagaaaaaaaaagccaaagggaacatcaggaaaaatgagagttcatacaaaatagcaagattggtgatgaagtaaacattttaagtcagtggttctcatattgaggtgtggatcagaatcaccacatagcttgttactaacactgaggtttagacaccacccaaaccacctggatcagactctgcagtcctggaaggatatttaatattctctacatgataattctgatgaagatgagaggtcgagaatctatacttaaatttttttcatctttcttcattctcagaatccagtcaagctcactgtggttaagaaggcctctgcttacctacatcatatgatctcaaaccagtgtcccctttactgctccctggagaggcctccttgcagacctcacatgtcctaacttacttccatctcttaggactcttcacagtctgttctatctcccacaaatctcctgattgggctctttgcatggctggctcctttcatcttgagatcttagattaaaagtcatttcctttaaggttgaccctattgatagtacctaaatccatgttgctattctctattccttgcctttataatagctctcaatttaaaaattatatatttattaacttctccaattgttatactgcctattcttacctataaacctcctcaaggacagaaacaatccctagttaacgctacattaagtaataaatgctaagcatataataggttttactcatttaattcccatagctacatacttgttctaaatgtatctctctgcctctagtctctcatgccttactacagtgattaaatattctctttattcatccagggcagcccagctaaatacaagaatggaaataggtggctgtatattcctatgcatctgccactgcttatgcctttacctatgcagtgcactgcccatttgccccttcacatagctatgggtaactttttctttgtctctacaccatagcaaaggtattgaggagttctacctactcaatcttcccttcaacttattctattactcattcatttgacaaatgttcaactggttttgttctttcctcccattgctcaggttttctcctttccattccctcatagtcaaggccattcctgtttttttaggaaatgtgtatcagtgatttttcggacaggaaaacacgtctatatcttactgaagttcttatgaaattcatggcacaaaaagacaggatatgcctgtaactcagaaatgtggaaaaaagtaatgtgcatgttcaactgttgcagtcatctgaatgtgaaggacttgctaacagaagtcacgttacatgtaggccagaggatggcaagccagcaacaggaacagccagaggaaaatctacaagctgaatgagttgtgtatgagagagaaacaggatgaggttttcaattatgataaggtggtctctattaaaaagctgaaatctagacacaaaactaggagttagcaaaaaaaaaaggttgaaattatatagacattttctactaaaactggaaattaataataaaattaaaagaaacacaagtaaaatctacctgaaaattcaaaagtctatattaaataactcttaggtcaataggaaaataagatctgaaacaatgtttttgatttttgcttgtttgtttgttttttgagacagagtctcactctgtcacccaggctggagtgcagtggtgtgacctcagctcactgcagcctctgcctcctgggttcaagcgattctcctgcctcagccacctgagtagctgggattataggcatgtgccaccacgcctggctattttttttttttttttgtatttttagtagagacagggtttcaccatgttggccaggctagtctcaaactcctgacctcaagtgatcctcccacctctgcctttcaaagtgctaggattacaggcatgagccaggccacctggctgtatttttgtttttttgaaaataatgggaggccaggtgtggtggctcacacctgtaatcccagcacttgaggaggccaaggcaggaagatctcttcagcccaggagttcaagaccagtcagggcaacatggcaagacctcatctctaaaaataataaattggctgggcgcagtggctcacgcacataatcccagcactttgggaggccgagatgggtggatcacgaggtcaggagatcgagaccatcctgactaacacggtgaaaccccgtctctactaaaaatagacacacacacaaaaatgagctgggcggggtgtcaggcacctgtagtcccagctactcgggaggctgaggcaggagaatggcgtgaacctgggaggcggagcttgcagtgagccgagatcgcgccactgcactccagcctgggtgaaagagcgagactccatctcaaaaaaaaatacatacataaataaagtaattaaaaaattagctgggcatggtagtgtgtgctatagtcccagctacttgggagactaaggtaggagaagtgcttgagcccaggaggtcaaggctgcagtgagctctgtctatgccactgcactctgggttgggtgacagagcaagactctgtttctttaaaaaaaaaaaaaaaattaagcctacattttgaaaacctgcatataagtatctataaaacataaccatagtgcttataagaaaatttacaaactaaaatacagcaataaaagtgaaaaacatcgttaaaagtctcattcaaaaaaagaaaataaaattaagctgaagtaaagcagaagaaaaatattaaccgatataaaagcagaattagttagaatacagaaatagaagtaataaagcataaaccaattttttttttttttttttgagatggaattttgctcttgttgcccaggctggagtgcagtggcgcaatcttggatcgctgcaacctctgcctcccgggttcaagcaatcctcctgcctcagcctcctgagtagctgggattacaggcacacaccaccacgcccagctaattttttgtatttttactagagacgggtttcatcatgttggccaggctggtctcaaactgctgacctcaggtgacccacccgcctcggcctcccaaagtgcagggattacaggcgtgagccaccgcgcctggcctcataaaccaattttttaatcaacaaaatgtaagccatggttaagataatgaaaacagcaagaaagcacagacatagaaataagaaagaacaaatgaaaatgatcatgaatacagaggacagatgactatgctaataaatttgaaaacacagctaaaatggataatttgttgtttttttgttttttgagacagagtctcactctgtcacccaggctagagtgcagtagtataatctcggctcactgcaacctgcacctccacccgctggccccccgccacgccccaccaccttcaagcgattctcctgcctcggcctcccaagtagctgggattacaagcacacgccaccacacccggctaaattttgtacttttagtagagacgggatttc[131 bp omitted]tttatcaaaactgatcatggaagagatagatgttaataaaatgtttatatagatcaattcccatagagcaaatagagaatgtgatcagacttaccatcccttttcccaagaataaagctttacaaaacttatttaagctttaaagacaggctatcaaaattctttttcaactaagaagatcaggacttccaaactgttttcataaagtgatactgatataaagatcgctcacaaaaagaaaactacacaccaatattctgaacactgaggaaaaaattctaaatatctaataaaacagcacattgaaagacccaaggggtgtttattacaagaatgttttaggctgggcgcagtggctcacacctgtaatcccaacactttgggaggccaaggtaggtggatcacgaggtcaggagttcaagacctgcctggccaatattgtgaaaccctgtctctattaaaaatacaaaagttagcggggtgtggtggcacatgcttgtagtcccagctacttgggaggctgaggtagaagaatcgcttgaacccaggaggcagaggttgcaatgagccaagatcacgccactgcactccagcctgggcaacaagagcaaaactccatctcaaaaaaaaaaaaaaatgtttcaatggttcaatatggggaaatctattaagacaattcaatataccaacagagtgaaggagaaaaaaaaaatcacacaatcaattccatagatgctgaaaaggtaactaaaaaaagaccaaaactgttcctgaatttgttttcccaagaaacagcgtcaccctctgtcaccacagctggagtgcagtggtgcaatcacagctcactgccgcctctaactcgtgggctcaagcaatcctcctgcttcatgttcctgattttttttaaaaaagctcagtgaaactgtaatgatacttccctaaatgataaagtatatattatcttaccaaaaaggcagcttgcctaacattaccactactattaatgatgtagtattagagttattagtcaacataattaaaaaatcagaaaaaaaaatcagaggtagaagaattagaggtaaaactctatttccaaaggatatgcctgtctaattggaaaactcaaaggtttaaatattataaatggcaacaaaatttagaaaggtagcaggatataaaataaaaatacaaacaacaatatcctttgaatatacatttaacaataaaatatgaggggaaagatctcactcataatacttacaaaaatttaaaatatatggataacctttatgaggaaaacttcgaaacactcatgaagtatttagcattgggtatactgaagaaatcatataccaaatcacaaggaagagattcctgcacagaagctaagggtgccccaccaagggtggtcatactaagaagctgctgagcaagaagcaggtgtggagacagtggcaatacacagggtaactgctgtgttcaaagtggtcagataaacttaaccctcaggttacctctccaaggccagacagcaactactactgtttacctccagaggaggcaacagacaagaggttagggtatcagagatgggtcagtggctggtcatgtcctggggatacagccacagtcgcaggcccaggtgacaaagcaccccacctcacaagaggcaactatgtttgttccaaacaaatttaggtgtgtttcacttttttcctgaaagtatctaatttaatttaataaatgttaaataaattcatgagtgtaaactcatgaataacaaggagaaaacaactgattctatgaaaacaaaattgaacattttggaaaactggtgataaatacagattgctaaaaatctcagctgtcgaaaattaagtgtaggaaatacaatagtaaaaaatgaaagaaaacataacaatcaagacgtattctgcactcatactgcaagtttggttcctattctactttaaaaataaataaaactggaaataatagacttcatattatgtgtgtgatttagaggaaaaatgaaatacaatgagacaatggaaaggaagacttggacactatcaaaaatactggcaaacagacatacatttgaatgttctaagttaaaataatacttttatggtatgtacataaaatatacgacccatttttttatgactaacagacctattaccagtcctaaatctgttggatcaaaggatttctagtccattaaacacttctgatgagaatgtagaaaagtcctttttttgatcaggtaaaaatatataaatacaaaaaatcataaatgtgattcctctttgcagagaaccacctttaattaaacagaaaatgtcatataaatcacttagacttactctatttgggcactgtatcaaccatcttactttgttgatacaagaagttctgggatatagaagatttggttccagggaagtcctatttgcatttcaacacagggataatgtacaaagatctgaaaatagtaaaacccgacatctaaggaactgtacttcggagaatcaattttaatcatatcctgaataagcccatactgaatgctaataatattccattgatgctctcacattctattgatcttctttttcactgagaaaacagcaacagaagaatatgctatcttctctccaccatcctgagcaacctacctgcacacataactacactgtttttcccttttattcccccttactcactggatcctttcttactccagtctcaaggacaattatgcctttctctactgcactgatttcctccaccgatagaatcattcctatgagcacacaaacatgccctaatgtcataaaatacactgctttttaacccatatccccagtgtaactgacaaccctatttcccagcttcccttcatacataattcctccagagttgtcttatactcattcttgttactgcctcacaaacccttctctcatcaagtcactccacttgggctttcatcctgactccattgaaaatctttcttgacaagcttaccaggattctccatcttgctggaacctggggtcaattctcagtcctcattctctactccgtccatggtgaaacatttcctttatttttattttatctcaatggctgccccttctttttttttttttttaatttttttagtggctgctccttctttatctcttttgttgtccctctttccctctttcaaaggtctacagggtggagtgacccatgagtcagttctcgggcctgcctgccttccctagttggtcacatccagatccatgaatgtaaattccaatcatacagacagccaaacataaaccaggctgtaatcgctccaagttccaggtgtacgtattcaactgcctacgcaacatctcaaactggacagataataatcatcacaaacttaaaatatcttaaactgaaactcttagtgccaactttccaacttgctcttcctattttcctcacttcagtaaattctgcttctattcacccagttgtttaagccaacactcatttcttctccttttatatcactccttcccacttagttcacttataatcctatcagcatgttcttttgacagcgccttcatacacatcatgagcctaacagcttcttactacttcctaacaatgccattcttatccaaaccaccaccctgtctaactcaacaactgaaactgcctcagtatcggtgcttcctgcttttgcactcaaccggagaaataattttagaatacaagcagcccgtggctttcaatttctcttagtggttacattaccgggtccttgcctaactctgatctcagcttcttactttccctttccctggtctgaccataatggccgtctttgttattcctcagactagcaaggctaatgccgcactcagaccttttctatcagctcataatgctcttttcccagaaaatgacatgtcttgagcccttacttcatgtctcttctcaaatatcacctcaagaaagtcatctgtccacttttctgaaggcatgttatttatactttaatcaaactttcttaaaggaagaatagaaaagaaagaaaaaaaatacatggtcttgtttaagatgtctaactctgagccaacagttactattttggctaaatgcttcctgactaaatggatattatcttattcacttggaacctctgcaatacattttgagtgttaataattgcaaatgtc[133 bp omitted]acacggtaaaaccccatctctactaaaaatacaaaaaaattagccaggcatggtggcgggcgcctgtagtcccagctacttgggagcctgaggcaagagaacggcgtgaacccaggaagcggagcttgaagtgagctgagatcacgccactgcactccagcctggacagaagagcgagactccatctcaaaaaaaaaaaaaaaaaaagattagggataagagggaaaaagcatgtttttctttcttttggtagaaggttaagtcagaagatagaacattacaaacagtgtaggcactgaaatggtcctatggttataaaataagaactagtaccctaaaataagtgtccttagccagacctgaatatacagagaacaaaatacaaaattacaacatatgtctctgaataaaaacatttttaaagaccttttgtggccgggtgcggtggctcacgcctgtaattccagtactctgggaggccgagatgggcggatcatgaggtcaggagttcaagaccagcctcagcagcatgg[144 bp omitted]gaaaccccaactctaccaaaaaaaaatacaaaaaaattagccgggcgtggtggcgggcgcctgtagttccagcttctcgggaggctgaggcaggagaatggcatgaacctgggaggcggagcttgcagtgagcaagatcacgccactgcactccaggctaggtgacagagcaagactccgtctcaaaacaaaaaacaataacaacaacaaaaaaaattatccaggcatggtggcaggcacctgtaatcccagctgctcaggagaccgagtcaggagaatcacttgaacctgggaggcagaggttgcagtgagctgaaatcacaccactgcactccagcctggggaacagagtaagactccatctcaaaaaaaaaaaaaaaaaaaggccaggcgcggtggctcacacctgtaatcccagcaccttgggatccagcgggtggatcacaaggtcaggagttcaagaccagcctggccaagatggtgaaaccccatctctacaaaaaatacaaaaaattagccaggcatagtggcacacgcccgtaatcccagctactccagaggctgaggcagagaactgcttaaacctggaggggcagaggttgcagtgagccaagatcacgccactgcactccagcctgggcgacagagcgagactccgtcgcaagaaaaaaaaaaaaaaaaaccttttgaaacaagagctgcaaagagagatgaaaacagcacagacaaggtaaacaaaagaccatgagatcattctctctagagtctattatatccatgtttcttcttaatgtgaagatagatgaatacatagatagaaaaatcaaataagaatgatattctgtgaactaggagctatcttctagaataattcatatgaaactttagttgctgataaaacatatatgattatactatcaagcatatcatttttgtagtcttttatttccctttaataatttatgagaaaagttgggggaaaaaaggcttctctgacaactaaaagagtcttcccagcacacatctccatccccttactctgcttacttttcttcatagcactctcattacctgacattgtatttcctatttatttatagttattatgtttctcttattacaaggtaaatttcgtggggatggaaacttgattggttgtttaccactatattgatagtgtctgtgacagtgcccagctccaaggccacctgtctatttattaaagaccgaagtaaaagtcctaaaccccgacagactgaaggaccctcttttggctaaagaccccatgttcctagtcatggcacatggcaggacagaaggctggtcatgacccatttgcttccaatccctttcacctttctgatcattagattttctcaaaagtcagctagagaaaataaaaggctgaaagacccttttgcttacttcatcagaacactcccccaccactccacactcctgtttttatggttccaacatgacagctattccagtccacagcttcttcttgataaacgacttccagccttggactggttttgactggtctcccaaggatacacagatcatggacttgtgtcctacatttacccttttaatgcataggtcctagttataatgcatttaaatgttaaatctctaccctaaagtggccataggacttatgttaacctaatatgcatgtgcacagtctctttcctgagtattcatagctcctcctgtagcctgttgaatatgtatacttggctaacattcagcatacatttctgtcttaccctctccctccctcgaaatgcccgtctctgggcagaagcctaggctacacttcccagtctgtcagaataaccgccttgcaggctgcaatcctttatgaaaaataaagctctcctttccaaatgtatgaactttgtcattcttcagctgacactataaatgcaaaagaggggctgggcacagtggctcacatctgtaatctcagcactttgggaggctgaggcgggcagatcacctgaggtcaggaattcaagaccagcctggccaacatggtgaaaccccgtctctactaaaaatacaaaaattagccgggtgtggtggcacacgcccgtaaacccagctactcagaaggctgaggcaggagaattgcctgaactcaggaggcagaggttgcagtgagccgagattgtgccattgcattccagcctgggcaacaagagcgaaactgcatctcagaaaaaaaaaaaaaaaaaaaaatgcaaaggaggaaagcaactgaatcaaaatatacaatggttgtcaacagtgagccaaagagagcaccaccttacccctcagctccattaaggaggaggaaaactagagagaacaataataaaaaagaagagtggtaaatgggacaaataagtgcttcttttagtatcccccagctaagaccttaatttgctccccatgtcacagacctttcctccttgggccacagacctttcctccttgggccacagacctttcctccttgggccacagacctttcaagagggctttctaaacaacataaggatgtgtctcttccccagtgatctggggttccctgtgttgatggcttcttcctgcccaactagccctcacctggatattgtcttcttcctttcctcacaactttccaaggctcttttccttgctccaatgaggaaatcacatctggtttagaaatgaagcatcctgcttagaagaaaaggaatataaggtacatgaaaataaaaaataaatcaaaattactttgattcagtcttggttaaagtatatgtcaaaacagtaattaataaggcaaaacaaataagtgaaagatgttttaaaaacatttacgttaaggttacacaataaatagagactagagagggaatgaaaaaatctttttaaaatctatattcatataagtgtttctttttcagaggcaatagtggttgagatgacagactgctgggtgcaaatcctgcctgaaccacatcctagttgtatgaccttgggcaagttacttccatgctaccttttccttccctataaaatagggataatcatagtacttatcttatatgattattgttaagattatatttatatatgtctgtatctaaacattgcctagagtatataccaaacactatttatatttcattagctattggttattgttattttgctgagaggaaaaataagctttctgggacatgtattatttcttggatattcaaacaatgttaaattaaatgtaaagttcttggattttaacagctttgctgcaatataatttatataacataaaacctacctaagtgtacaattcaatgatttttagtaaatttacagagttgtgcaaacgtcaccataacccaaacttagaatatttccgtcatcccccaaatatccctattggtcactggcagtcaatcctcattcctactcccagccccagacaaccattgatcttctttttgtctctatagatttgccttttctgggcatttcatataaatagaatcatataatatgtaatcttttgcatctggcttcttccacttagcatagtgttttttatattcttgcatgctataacatgtatcagtagtttgttccttcaatgaatattctattgtatgactatgccacattttatttatccatttatttagataatgtgaataatgctgctgtgaatacttatacatctttgtatagacacatttttatttctcttgagtaaacatttaggagaagaattacagggtcgtatctatagtatcgtacattcccactgcaatgtatgagggttctagtttttccaaatactcactaataattattttgtcttttgactaataattgtatatatttataggctacaatgtgatgttttgatacatgtcattgtggaattagcaaatcagggtaattagcatatccatcacctcaaatatttatcatttcttttctttgtagtgagaacattaaaaatactctcttgtagctattttggaatatacaatatacaatacattattattaactatactcatcttgctgtgcaataaaacacatgaatacaaatcttagatttttaattttcttttttttttttttttttttgagacggagtctcgctctgtcgcccaggctggagtgcagtggcgggatctcagctcactgcaagctccgcctcccgggttcacgccattctcctgcctcagcctcccaagtagctgggactacaggcgcccgccactacgcccggctaattttttgtatttttagtagagacggggtttcaccg[140 bp omitted]gattgtttattaatgaagggaatgagttctcttgaattgtaaatacatgctgttgatccattttaccactacataaatcatatgtattattttgatagagctaattcaataaacaggatctagctatttcccttacaaaatataccaacaagcaacaaaacatctaaagcagttctgaattcaaacacaaagtgaaacttgttttctttgacgctggtgaggctacaaatcacaaagatctcaaacccagccccttcattattaaggcccaagggctacttaaggatggggaaggtcaatgtgcttaatgaaggtgctcacttccaatgaaataaagctcaaagtgttccctttagaaagtggagcaaaaatttagatagcttcctaaaagatactcttgaaatttccacaggaaaaagctgatttacagagaacacagtctaaattcctagaagcagataaccttacccagtgagaccaagttgctgtagttctccaacatgacatctctgtacaagtccttttgttccaagtccaggtattcccactcttctggagagaagtctatggatacatcactgaacatcactgatcgctgaaatgacaaaccacacattataaatgaaatggaagaaaatgtattttaaggtagaaggagaaaagaaggaagagatattgcaggaagtggatcatatggcaagaaaacaggcttgggctggaagcctgcaacacagcgagtcaggaaatgagtgtgcctgaagcaaagtgcctgggttcccgaaggattctgttgctacagacacagactcttatactctggcaaatcttaataatctagatactcctgggaaagaaaaaaaaatcagttttccaattaaatgaaatactgtatataagcctttgcctactatgtctccctcatcaattcccaaggaaggtgagttcttccgcccctttcttcttaaagaacagatttttttttaaagtctccctccctacaatatctttatcttagaaaaggatctaaatgcaattagagaatatcttctaagtttatcctagaagcagatcatatcataagcatttttctaattatgactgttaaaaattggttgtataggccaggcgcagtggctcacacctgtaatcccatcactttgagaggccgaggtgggaggatcacctgaggtcgggagttcgagaccagcctgaccaacaggagaacccttgtttctactaaaaatacaaaattagttgggcctggtggcacatgcctgtaatcctagctactcaggaggctaaggcaggagaatcgcttgaatccaggagcagaggttgtggtgagccaagatcacaccattgcactccagcctagccaacaagaacaaaactccgtctcaaaaaaaaacaaacaaaaattggttatataatagtctatacaatgcatatatgagatttaatcattcttttatacttagatattttggttggacaaaaccttaagatcctcctcaattctgggagtcaacgtgactacttatgtacctggattaccttctcacatgctatcactttccatccctcactgtatgccttcctggttcctgagttaaaggatattaatatagcataatccagaatcacaaagatgtcattctagaccagcacatcctgttcaaccaaaaatggaatcttgttcctgagtgtaactcaggaattccaaaagatctcagatctctctataagacctagccacacccctactcagtcctaaaagcctcacaaaacatgagatcttatgatatactgaggctgaggccaactaacagcaactcttacctttttgttttataactttttttttttaagagacagggtctccctgtcacccaggctggagtacagtggcacatccatagcttcattggagcctcaaactcctgggctcaaacaatcctccatgtcaacctcctgaacaggagggattacaggtgcaagccaccatgcccagccacgacccttatcttacgtacttggaaaactcaaagttcagttttcctatgagtggctaaatgggcccatggtcaaatatttaagagatttcatttttcctccattgcagcttttagcagaagactgagcacatataggagatgctgaataatttgttcaacaaagataagaacaatgactagaataaagagtgttcataggacaagcattgtggttcacccgccactggatttggaagaactggaagaaggttcttggatggagctctgatagtaaggaagtttcagaataaaaaaatggtcacagaaccttaacatgatagtattcctaggaggagaaaaaaacttacaagggccatggtatagaaattcaagaactggtcagtcctccttggggtttacttgccaggagaagcaccgagtccacagaggctgatctagggagaggaaaacaaggccatgagatcagatggacctcagaaatccccaaatgatttgagttactgtgacctttcccctctcttctgatctctccaccacagctcctccaacacacacgcgcgcacacacacataggcagagagagagagagaaatttgagggagtctggacgagtctaatcccttgctaattccagggctgataaggggctgtatcatctaaaccacaatcttccttcttcaaagtttcataggcctgtttagattcaccagacacaaagagagaaattcataaagaccaagcctggcagccattaccaccacaaaactgcacactggcagccctgcttgcagccagaacaactttcaaaatcctctgggctcatcactctctctttccagtcagaatcagaatcatccacattgttttctggaatgaattcatttgccattctctttcttacaacctaggctgaacaggcatggattcatgctcttggtcatttgacaataacaaatgtctatttatcaagaattccagtatgttgggtgttatatatgtatgtgtgtgtgtgtgtgtatatgtgtgtgtatatatatatattttgttgttgttgttgctgttgtttgttcttgtttttgtttttttgagatggagtcttgctcttattgcccaggttggagtgcggtggcacgatctcagctcactgcaacccccgccacccgggttcaagcaattcttctgcctcagcctcccaagtagctgggactacaggcacgcaccaccacgcctggctaatttttgtatttttagtagagaccaggtttcaccatattcaccaggctggtctcgaactcctgacttcatgatccgcccgcctcggcatcccaaagtgctgagattacagatgtgagccaccgcacccacccggcctgttttatatatattaactatatcctcaggattgctctttagcacaataattattctatccatgcaatggatcagaaattcacatgaagagaaataaaaccacttgggctgggcgagatggctcacgcctataatcccagcactatgggaggccaaggcaggtggatcacctgaggtcaggagttcgagaccagcctgaccaacatggtaaaaccctgtctctactaaaaatacaaaaattagctgggtgtggtggcagacgcctataatcccagttactggggaggctgagggaggagaatcgcttggacctaggggggcggaggttgcagtgagccgagattgcgccattgcaccccagcctgggagacagagcaagactccatctaaaaaaaaaaaggaaataaaatcatttgtagaaatgcagtttatgagtagcaaagctgcatttggaatcatttatctaaccatagagtcggctttccttcaactctagctcttgtttctgaaacccagaatttctattccagtgagcgaaaactggcatgcatgattcactaaaaaaaaataaaataaaaataacacatcagctcaccaacaggtatctgagtactgatacccatatttgcaagcatgagaggaaatgaacattctaaccagtatactgcagactgcatagatttcaaagtatgtacaagcagcatttaaaccacgcatactctttgattcagaaattctactttggggattaaaaaaaattgtacatatgatcaaaggtatgtgtaacagtatgttgaccttgttcataatggaaaaaagctgggaagaacctaaatgtccttcaatagaaaacagattaaataatcctggctaacatggtgaaaccccgtctctactaaaaatacaaaaaattagccgggcatggtggcaggcacctgtaagcccagctacccgggaggctgaggcaggagaatggcgtgaaaccaggaggcggagcttgcagtgaggcgggatcatgccactgcactccagcctgggcaacagagcaagaccccgtctcaaaaaaaaaaaaaaaagaaaacagattaaataaatcataaagcatccatagagtaaaacaaactgttgccatttaaaaaatgataatgcagctctttaactggaaatatggaaatatgttcagtacagtttgttgagtgaggagtgcagtaacaaacagttgtgagtagtatgatcctgttaaggtacagcaaaaacagacgtgagagaaacagagagagagagagagagagtgtgcgtgtgtattaatctctaagtgctaagttttagaaaatacacaaggacatataaaatattcaagatatataatctcttagaaaaataaaatgaacattattaggacatctgtaaagtatacatgcaaatcagcacaaagaaacactgacaggcatcaatagatattgatcttgatttccttttcgcttacatttatttcataattctacatgaccatatatacttgaaacatatattttaactttgcatagtggaaagcgttctttaaataggttaaagagatagtttttaaagtagtcatcccttgaacttggagaaaaaaactcaatatcctacaagcagcttctatgtttttactggttttgttgatttcagctcccaaaatctgaactgactctatgatttctaagtgtgttcatgtatgtcagagttctgcctatataaacatggctaaacatcttcaattaatgccttgtttcactgctgctacttctcatgacttcttgaccaagcttttgttttgtttctgaaagagttgttttagccatgaggcccacctaggagctgctgaatcttcttgtgctgttcatttgcatcaacatcatgaaaataaaaactataaggcacatgcttattacataaaatccattaccccacaggaaccccatgagtttggtattatttggtcgtgacctgacaatgcttgctacaatcagctgtctgcttcccatgacctctcaagccatgccacctgaattcttcaatgactttacctcacctatctcagtgttattcttgcataggcttatctaccttgaaagacaacaaacaatgtaaggatatcaaccatgtcattttggtcactgtatttcccccaaggactggcacaggatctggcatattgtgagtactttataaatgtctcataattcaacccagaaattccacttttaggaatttatcgttaggaaatatttgtaaaagtatacaaagatgtattgcaagagagttcatcaaagaataatttattggccaggcatagtggctcatgcctgtaaccaacactttgggaggccgaggtgggcagatcacttgaggtcagcagtttgagactagcctcgccaacatgacgaaactccatctctaccaataatacaaaaataagctgggcgtggtggcagacacctgtaatcccagctacttgggaggctgaggcaggagaatcacttgaatctgggaggcggaggttgcagtgagctgagattgcaccactgcacttcagcgtgggcaacagagtgagattctgtctcaaaaaaaaaagaataatttacgacaacctgaaatcaaatacctaacagtaggcaacaagttgaataaatgatgttctactatattatagcacattatgcaattattaatgatggcattggcccacattaattaaagaaggaagatattcatgataaattactagctatgggagtcagactaaaagaatatgtacaatgttgggaggtggcagactctcagttattaaaaatacaggctttgttatcaagattcaggatatgaacagagctctgagaattattaactgtgagaatttggacgcattaattttcagtgtctcagtttcctcagatataaactaaggaataaacagtacctaccttatagggttgttgtgaaggttaagaacataatacataaagcacttaaaatggcttactgtaagcactaaattcagtgaaaaacatcacatacccctcattccactattttaaaaattatcttcaataattttttttttttttttttgagatgcagtctcgctctgttacccaggctggagtgcagtggcaagatctcggctcactgcaagttccacctcccgggttcaggccaatcgtctgcctcagcctcccgagtagctgggactacaggtgcccgccaccacgcccggctaattttttgtatttttagtagagacggggtttcaccatgttagccaacatagtctcgatctcctgacctcgtgatccgcccgccttggcctcccaaagtgctgggattacaggcgttagccaccacactggcttcaataattttcaatttaaaaatttggtatttgctgataaattatctttaacaatttcaatagcagtccctttctctaaagggatttttgagatttttgagatttttcagcattgctcttaaaacattgataaatgttagaactaggcttgaaaatgtaattctacttttttttttttttttttgagacacaatcttgctctgtcgccaggctggaatgcagtggcatgatctcagctcactgcaatctctgcctcccgggttcaagtgattcccctgcctcagcctcccaagtaactgggactgcaggagcatgccaccacacccggctgattttttgtattttagtacagacagggtttcaccatgttggccaggatggtctcgatctcctgacctcgtgatctgcctgcctcggcctcccaaagtcttgggattatagagatgagccaccgcacctggcctatgtaattcttcttaataatgttatcaaaaaaggattcacagaaatcaaaaagtagagcaaggcccctgttactttccatccctagtagctccaaagggacaccattccatatcataaaaccagctcaagaattttgctttgataaggtatcatattaaatactttttttttttttttgagacagtttcgctcctgttgcccgggctggaatgcaatggcaagatctcggctcactgcaacctccaccttccgggttcaagtggtcctcatgcctcagcctcccaagcagctgggattacaggcatgcaccaccacgcctggctaattttgtatttttagtagagacagggtttcaccatgttagtcaggctggtctggaactcctgacctcaggtgatccgcccaccttggcctcccaaagtgctggaattacaggcgtgagccaccaggcccaacctctttttcctttttcaaacaaagtgttgcagagtctttgtctccttaaatgatcaattgttgtgattctattttggaaaacaaacacatgtgcacaagtgcacagaaaaaaatggaaaagcaaacattagaatagtaatatttattgtggatggtgagactacgggcaacttaaattttattcttatagagtgaagatgactgggtggtaggggatggagaaaatctgttctgaatagtactaaatatagttggcagcttaaaccaggactttcttttttttttggagactgagtctcactctgtcacccaggctggagtgtaatggcaggatctcggctcactgcaacctctgcctcatgggttcaagcaattcttctgcctcagcctcccaaatagctgggattacaggcaggcgccactgtgcccagctaatttttctatttttagtagagacaggttttaccatattggccaggttggtctcaaacttctgacctcaggtgatctgcccacctcagcctcccaagtgttgagattacaggcgtgagccactgcgcccagccaattaaactattttcatacacatagaattaaaaacagagttgtgaagaaggaatatcttttagttgttaagaaaattgtgattctataagcctgtgacatgagtgggttttgggaaaataaacaacagtgtggcacaaataagtaacacccatcagttctttaactgttcttcatcaaaacgatgggctattttcactctcaagattcttctatgaatgaacacaatcaagcgacattcctaaattcagtaaaagtataccaaagcagacagaacagtgtggtaaacaacagtttatctttttttctccactaagaaactagttttatattatgtataatccttgcaaaatgttttataaatctctagcttattaagagcgattcatacatgattaaaggttttgtgagtcatcttgttcaaaactattgcttagacaacatcgatcacaagctttttttccttctcataattaacagtatttattaatggcaaaaagctgcatcacatggagtgtggcttatttaatcatttcctactattagacactaattttgtgtctaacattgaaaaacattctcaaaggttacagactttgattctaggccagtagatctgaatcttaatggatcatgtttgataatctcattaaattacatattttctccccataaaagtggcatattaacagatatctataacaattttacgtacaatttcaaagagtatctggtcccctgaaagcctcaaatgaattcaaattacttctggttaagaattcctgttctatggccgggcacggtggctcatgcctgtaatcccagcactttgggaggccaaggcgggcagatcacctgaggtcgggagttcaagaccagcctgaccaacatggagaaaccccgtctctactaaaaatacaagattaggcaggcgtggtggtatatgcctgtaatcccagctactagggtggctgaggcaggagaatcgcttgaacctgggaggcggaggttgcggtgagctgggatcacaccattgcactccagcctgggaaataagagcgaaactccgtctcaaaaaaaaaaaaaaaaaaaagaattcctgttctaggctgggggcggtggctcatgcctgtcattccagcactttgggaggccgaggcaggcagatcacttgaggccaggagtttgagaccagcctggccaacatggtaaaacccggtctgtactaaaaatacaaaaattagctgggtgtggtggtgcaggcctgtaatcccagctacttgggaggctgaggtataagaatcgcttgaaccacggaaagggaggttgcagtgagctgagattgtgccactgcactccaacctgggtgacagagcaagaccctgtctcaaaaaaaaaaaaaaaaaaaaaaaaaaagaattcctgttttagactatttaagcatctgatctggctcatttattttttactaggaaatactcaccacaattggcttagtattttcattttccccccatctatagaaggctgatgtagaattgctccaaatcactacttaagaatacataactaaggtttattaagtactaacgaggtctcaggaactgttctaagaactttacacatagtaattaaaagaaggcccacagaagtaatgaaaaacatctaccaaatgggtatgtgcatacaggctctcgggaggggacctaggtatcagctcaatggacaggacatttatggagaatgaaacaaatattctcatgtcctaagaaataagaatgcatttcacagaagaaagcagaaacacccactcgcctcgaccttgacttaaacaggcaacagcaattcattcctcctcccgctcggaccccttttcttaaagaattgggcaggactggctaataagggaaccaggcttttcttgcagcccagcctcgcatagggcacaatgcccccaccgcccacccacacataaccagagtaacataagagagatggtgttgttaactcttcccagtatcaaagaaaggccagggtcatggatgcccggggctagaactggagttcacaatagcttcctggaagcaatgctgtggttctgaaacctgcagctggactcttcagagttgtgagtgcacgtgcgtgggtccgggtccgcgaggaggtggtgtgggagtcccttccaggagcaagcctgggcgggagcgggggctcgttcagttctaatattcctatcccaaggtcgggtctgagccttgtttcgctgttgcccaggctggagagtagtggtgctatcatagctcgctgcagcctcaatctcctcctaggctcaagccatcctcccgcctcagcctctcgagtggctgggaccacaggagcacgccatcacacccggctcattttttaaatttctggtacagatgggagtttcgctttgctgcccaggctggtctcgaactcctggcttccagcgatcctcccgcctcgctctcccagagctctgggattacagatgtgagccacctggtccggcctagtctgcgcgtttctgctgggagtctttggcgtgcagaaactgaccgagggccatttctctgcagctgggcccggtgtgggcagaggatgctggggtcagtcacgcactccacggccacaacaaccttcgctcatacaatagtctctgcacccaagtcagccgcacagactccgtcacgtcccagccccggccccgtcacgcccacgacacacacacccgggcctgaggcgcgggctcccgcccctctgcgatactgcagtggccccgcttacctctctttaccccctgggccgcagcgcttttcctacagattaccaggaccgacgctccgggccaggactgctcactcggggcgcgaacccgaggcacagcgatgcccgaacggaggaagccgctgccgggtcacgccacaatccccggggcctaacgggctgcgcgcggaggctgctgggagggccgggcgcgctcacggagtgcgcaggcgcggccagtctcaagggtccgctcgctggtgcagcccctgctctgcgtgaacccggagccggagctaggtccgtcccagcgaggctgcgcttcgagtcccttagcgcctggggacggcgcggcagggcctggaggggagcggggacagatggctggcgcgttaaagaggggcgcccgcgaccgcctctctatagtgccaactagggagccctgtgagcgaggacggcgctgcgagtctgtccctggcgcgctcctgggtgggattctttcactgggtgtggctgttgggatttgagaccgtgtgactccggagattcggggaagccagttcctatattttccatttctgtatttttaaatggtaaaaacaatgaaaaggagaacaatattttgtgaaatatgaaaatcatacatgtcaaatttcagtgtccataaataaaagttttattggaacatagccgtgtttgattgtgtactgtctattgctatatttgagctacaaggacagactcgagtagttacacagaccagatggcccacgcagcctaaaatacagtcagttctcactattcacagtagttatggtctataaacttgctacaaacacggaattagtgaataccattccactgcttctaggggaaatacagggttagtttcctgtaagcatctggtcacattttagtcaaccgatgaatgcataagcttattttattgtgtttattttctttttttcttttttttttttttttttgagatagggtcttgctctgtcacccaggctggagtgcagtggtgggatcttggctcactgcaacctcctccgcctcccgggttccagcaattctcctgcctcagcccccagagtagctgggaatacagatgcatgtcaccatgcccagctgatttttgtattttgtagaaacggagtttcaccatgttgaccaggctggtctcaaactcctgacctcaggtgatccacccgccttggcctcccaaaagtgctgggattataggcatgagccaccgcgcctggccttattgtgtttctatttaaacactttaatatatattattgattcattaacattgaactcatggccaacagctccataactcatgcctgaatgaagcttatctaacacatgtattttttctgtaagacacatgaccgctttctcattcataggaacatcaacagcactttagtactactacatttggggtccctttgaaacagcaaaatcaccagcaaaaaacaaaaatatgagaagccaaggtactaaatggactgcaaaaagggtacctgtttacagtatgagagctgaaataagaagatagagggtcactttgtttgactttggctgagaacatgcctgttaagggactcaaaaaggttcaccgctcttcggatgtccacaaatgaccacaaaggtgctgcaaatattgactctgggtttataaaaaagttttagcaagtagatgaattcacaaattcagaatctgtgaatgaagattgactgtatttactatcaggccctttaaagaaaaagtttgccaatccctgtttttatatgtccctcttagttatacagctagtgtttaaaaactacttgaaataattattttccctgtgccaccaattatgtctataattgattgtaccccattaaataagcacaaagaaaaaagaaagctttctttatagaagaaggccagctaataactatcaagggtttgattttacgtggcttagacacgctgcttcaaatgcatttaagatgtttggttttaacaaggattttgcaacagtatagtgttttccttaagttcaatgtcatttctatgtcatggcagctgtcacctgcagttaggtaagacagtgacatcattaacatggatgcattttcatggcatgaaggctagccattgatggggtaatataacacaatttatcagtaaacgctgagttttctttgaagtcagtctctgatttcttacagtgcttgatgtctgccttgcctgctagtgaccaattcccctgcgtctttacagagccttgttactcactcagtgtaaagacagtgggggaaacaaggtttcccaaagtatccttatgtgcaaaagtgtttcttactactttggaaatactaagctgagtttaatgtttattctttttctaccaacagacacaaaaaggacaagcacatgccttagaatattcaatacaattttctacagcgatatggttaaatactcttctgtcttcactacttttttgtttttactttacttggaaattttaattctctaggaataacggggcaggagtctaaaataatactttgtgggagtgaagtatatatttttttccaagtaaaaaaaaaaaatcaggccaggcgtgatggcttaggccaggcgtgatgactcatgcctgtagtcccacatactcggaaggccaaggcaggaggatagcttgagcctgtgagatcgagattacagtgagctatggatcggccactgcactccgggctgggcgacagagcgagaccctgtctcaaaattaaaaaaaggaaaaaaaaaaaaaaaaaagtctgcgctccccggggcccaaggagaggacccaggagaggagtctggctccttttgcctcagacgagtccagggcgccgggttaactggtctaaagtcccaggcgctttctgggactgctcagccaccggccgctcccggcaccaggggacgccggacgccctctggacaatcggcgcacttgccacgatcttggacgggcctcgggcctcgaccttaagattccccgctccagctccgagatgtcagcaacgctgatcctggagcccgcgggccgcggctgccgagacaagccggtgcgcatcaccatgcgcggcctggcttcggagccgctggacacgctgcgcgcgcgtccctgcgcgacgagaaggctgggctcttccgctactgcgccgacgcccgcggcgagctggacctggagcgcgcgcccgtgctgggcggcagctttagggggctagagtccatggggctgctctgggccctggaatccaagaaacctttttggcgctttctgaagcgggacgtacagattccctttatcgtggagttggaggtgctggacggccacgaccccgagcctggacggctgttgtgacaggcgcggcacgagcgcgacttcctcccacaaggggtgcggagcgattcggtgcgcgcgggccgggtgcgcgccacgctcttcctgccgccaggacctggacccttcctagggatcattggcatctttggtaatggagggagcctgttggaatatcgagccagcctccttgctggccatggctttgccacgttcgctctagcttgttataactttgaagatctccccaagaacgtggacaacatacccctggagtacttcgaagaagccctatgctacatgcttcaacatccccaggtaaaaggcccaggcactgggctttggggcatttctctaggagctgatatttgtctctcaatggcctcattcttgaagaatgactcagacacagtttccatcaatggatccgggatcagtgggaacagaggcataaactgtaagcagaatagcattccaccattgggctatgacctgaggagaatcaaggtagctttctcaggcctcgtggacgtcgtggatataaagaatgatcttgtaggagggtataagaaccccagcatgatttcaatggagaaggcccagggccccatcattttcattgttggtcaggatgaccataactggaggagtgagttgtatgcccagtctctgaacggttacgggcccatggaaaggaaaaaccccagatcatctgttaccctgggactgggctttacactgagcctccttacttccccctgtgcccagcttcccttcacaaattactgaacaaacacgtgatatgggttggggagccagggctcattctaaggcccaggtagatgcctggaagcaaattctagccgccttctgcaaacacctgggaggtacccagaaaacagctttccctaaattgtaatgcgtttgtctgttgttgacatgagagagtcaagatcagattctagtgttcaataaccctatgtgaatcagctgtctcctggataacatt[137 bp omitted]gaaaccccatctctacaaaaaatacaaaaatcagccaggagtggtggcgggcacctgtgatcccagctacttgggaggctgaggcaggagaatcgcttgaacccgggaagcggaggttgcagtgagccaagatcatgtcattgcactccatcctggaagataagagcaagattctgtctcaagaaaaaaaaaattagtaaactagaaatctctgaacaaagtatcatacatgtaatttaattttcccatagatataggtaaagagaagttgttgagttacagcctctatctagcacagcaatctcctcaaaacacaaggtagccgcccggagaggccacagaggagatatctaagagatataacactggggatgtttgcaattggaaattaaatgacattttagaaatgtagttatcaatgtcaagccttgatagacatcagtctgaaacctaatacatgttttatatataataaatttaaacagcttaaattctcatccattcaaaatgggagaaaaactaagtaaatgtgataaatgtattgaggtgtttggctttcaatcaatgcttcctgatactcgaaaagtcttcacagggaaggaaccaaataaatgcagagtatggaaaaaatgaagccatacacatattattgtgtggtaaatatttccattgaaagtcaaatctttacactcaccgaagcatttccataagagaaaagatgtatattagaaatgtaaatgtttttatagcaattgaaatctttacagaggtagagaaatctggtaactgttattagtgtagtagggatttaagctaagttcttgtctcatggtagtcatccaggttcttgatgttttgaacaaagaattggacaaaatgcacaaagcaacaaaacaatgaagcaacggaagcacagatgtattgaaatgaaagtacactctacagagtgggagcaggaccaagcctcaaagagtgctggttacagaatttcctggggtttaaataccctctagaggcttcccattggttacttggttacaccctatgtaaatgaaggagtggcccacaaccagtctgattggttgcagaagacaggaccaatcagagactaaatagtagttaccaagttacgccctatgcaaatatctgattgattgcgggaggggaccaatcagaggtactttccatttttcatctgccacacagtgcaaaggtagtaacctctgatccttttgttatttgggtgtggagagacggggttttccttttgattcagttctaagaagtcagcgggaatggccttaggttccctgcctccagacctattctcctgtctcacctccatttatcactaaagagttcacaatacatgaccctccagaaaagagacatgtgacattaatatgtcagactcaaccagtgtcttcacactggaatgactttattagtgtgaagctggagtaacattttatcattagcacagaacgagaagcattgcagatgatagagccttttttggtcaccaagtgacgcagccagtacactgttgactagcagtgatggtagcaggccttcttgccttggtcctgatcttaaagggaaagatttcggtatttcatcactaagtaaaaaatgtgttgttggttttttgaaacagggtctccctctgtcgcctaggttggagtgcaatggtgccatcagggctcactgcagcctctacctcctaggctcaagtagttctcctgactcagcctcctgagtagctgggacaagtaccaccacacccagctaatttttaaaattttttgtagagatgaggtctcactatattgcccaggctggtctcaaactcctgggctcaagtaatcctcctgcctcagcctcccgaagtgctgggattacaggtgtgaggcaccatgcccatcaaaaaatgcgcttaaatttctccctggatatcctttcttagaagtttccttgtatctctatttttccaagaggcttgatgataattggatttgaaattctatcatcttttctgtatcttttgagatgatcctggggttctttctaaattaatacgttaatgtggggaatcatattaactgatttttaaataataagtcaaacttgcatttctggaataaatatctcaagttggtcataatctagttggctaaaaattaataaagttgtttccttaatgatttagataagaactttgcatctaccttcatgaatacaactaccccataattttcttttctcatactgtctttgagagattttgaaatcaaggtgatattttctttctttgatttttttttttgagaaaaagtctctctctgttgctcaagctggagtgcagtggcatgatctcagcctactgcaacctccaactcctgggttcaagagattctcctgcctcagcctcccgagtagctgggactacaggcacatgccaccatgcccagctaatttttgtgtttttagtacagacggggtttcactatgttggccaggctggtcttgaactcctgacctcgtgatccacccatctccacctcctaaagtgctgggattacaggtgatcatattttcattaaagaagtcactgtttctgcctttttattctctgggaaagtttactatgtaaggttggaattcttcttaacttgaatgggttggtagaacttttcaattaaatcatttggaactgaaattctctttctgggttgctgtttgctgatagtcattccaaaaacttctatgccaaaaaagccacacactaggtatcttggttcatagtttactcagtgtaacacataataaatatctccctgaagccaaggaagaggccaccttccacccttcagggaacagcagtgagttcagggaacagtaatctctttctcaattccagctggtcttacctatagttcttgtgtgccagattcccttttgtatgttttgtacctttgtggatttgattacaagtggggtcgcaattgtggatagcctgaagatatgagaaatgtctattgtgggaaggtaatgaaggagagttggtgaccagcaggacgagagctttagccatggggctaataagacagagccaagtcagcagggacataagatgtaagagggctctggtgctcaggtagaactggataaaggatgggtgagctggagttaaacgttccatgtcataacaccaggaaagcaataaaaatgtttttattgtggcaaaatatacataatataaaaagtcaccattttaaccatttttaaagcataacatttagaggcacttagtgaattcacagtgtttttttgtttttgtttttgtttttgttttttgagacagagtctcgcattgtcgcccgggctggggtctggagtgcagtggcacgatcttggctcgctgcaacctccacctccacctcctggattcaagccattctcatgcctcagcctcctgagtagctgggattgcaggtgcccaccaccacacccagctaatttttgtattttagtagagatggggtttc[144 bp omitted]atttaatcaccactcccctaaaaaaagaaataaaaataaaagccactgataaggtttggctctgtgtccctacctaaatcgcatctcaaattgtaatccccataatccccatgtgttgaaggagggacttgatgggaggtgattggatcataggggcagtttcccccatgctgtttttgtgatagtgagtgagttctcaccagatctgatggttttataagtgtttgacagttcctccttcacactctctctctcgcctgctgtcatgtaagatgtgcttgcttccccttccgtcatgattgtaagtttcctgaggcctccctagccatgcggaactgagtcaattaaacatccttcctttataaattacacagtctcgggcagttctttatagcagtgtgaaaacgaactaatatacctacatatcttctaagttgctttccattccttacttcctccagccatggcagctactaatctgctttctgtctctatggatttacctgttctagatactttcatacgagatgagcccttttatgtctgactcctttcacttagcataatgttttgaatattcatccatgctgtagcatacatcaatactttatttctttttctagctgaatactattccattgtatgaatgtaccacattttgttgatccatcagtagatagaagtgcgttgtttctaccttttcgctattgtgaatattgctgccataaactttgtggacaagtttttgtttaaacactcattttcaattcttttaggtatatactcaatatatacaagtgggccaggcatggtggctcacacctgtaatctcagccctttggaaggccaatgtgggcagatcacttgaggccaggatttcgagaccagcctggccaacatggtgaaactctgctctactaaaagtacaaaaattagctgggtgtggtggcgtgcacctgtaatcccagctacttgggaggctgaggcatgaaaatcacttaaattcaagaaggggaggttgcagtaagccaagattgcactccagcctgggcaacagtgcaagattctgtcttaaagaaaaaaaagtctttaaaaaataatatatagcatatttatatatatatacacacatacacacaaagcatacatatatatatatatatatatatatatggaattcctgagtcatacagtaattttatgtttaatttattgagtaaccaccaaacttttttccacagcagctacaccatttacatttccataaacaatgtatgatagttccaatttcgctacattctcactagcacttattttcctttaaaaaaaaaattattggccagacacagtggctcacgcctgtaatcccaacactttgggaggctgaggtgggcagatcatgaggtcaggagtttgagaccagtgtgaccaacatggtgaaaccccgtctctactaaaaatacaaaaatcaggtggacgtggtgctgcacgcctgtaatcccagctgctcagcaggctggggcaggagaaatgcttgaacccaggaggcggaggttgcagtgagccaacatctggccattgcactccagcctgggcgacagagcaaggctctgtctcaaaaaaaaaaaaaaagatttgtccttgaatgttcatagtagttttattcacactgccaaaaactggacactacccattctctatcaactggtaaacagataaacaaattggaagatgtccaaaaaatgcaatattactcagaaaacaaagaataatttactgatatatgcaacaacatgaatgaatctcaaaagcactgttaaatacaagaagctttacataaaagactacatactgtatgattctatttatatgaaattctagaaaaagtacaactattgtggacaggaagcagaacagtggccctcaggggctggggcaggggatgg[131 bp omitted]gagaaaccccatctctactaaaaatacaaaattagctgggcatggttgtgcacacctgtaatcccagctacttggcaggctgaggcaggagaatcgcttgaacccgggaggtggaggttgcattgagccgagattgtgccactgcactccagcctgggcaacatgagggggtgggtgcagtggctcatgcttgtaatcccagcactttgggaacccgaggtgggcagatcacttatggtcaggcgttcaagaggagcctggccaacatggtgaaaccctgtctctactaaaaatacaaaaattagccaggtgcagtggcactgtagtctcagctactctggaggtggggagagaaggtgcagtgagatgagatcatgccattgcactccagcctgagcaacacagcgagactcttgtctcaaaaaaaaaaaaaaaaaaaaggcatgagggagctttctgagttgatggaagttctgtatatcatgattgtgttgtggttgtgaaaggaacacatcttgggcccccaaaatcactaaagtaaagagaaaagtcaagctgggaactgcttgggacaaacctgcctcccattctattcaaagtcattcctctgctcactgagataaatgcgtatctgattgcctgtttggagaggttcatcagaaactcaaaagaatgcaaccatggccaggcacggcggctcatgcctataatcccagcactttgggaggccaagccgggcagatcacctgaggtcaggagttcgagacatggccaaaccgtgtctctactaaaaatacaaaaaaattagctgggcgtggtggtgggcacctataatcccagctcaggaggctgaggcgagagaatcgcttgaacctgggaggcagacgttgcagtgagccaagatcatgccactgcactccagcctgggagacaagagtgaaactgcgtctcaaaaaaaaaaaaaaaaagccataaataaaaacaatgcaaccgtttgtctctcacctacctatgacctgtcctacctttgtggaccgaaccaatgtttattttacatatattgattgatgtctcatatcttcccaaaatgtttaaaaccaagctgtgctctgaccaccttgggcatgtgtcatcaggacctcctaaggctgtgtcacggacgcatgtcctcaaccttggcaaaataaactttcttttttttttgagatggagtctcactctgtcgcccaggctggagtgcagtggcaagatctcggctcactgcaacctctgtctctcaggttcaagtgattctcctgcctcagccttccgagtagctgggactacaggcacccaccaccatgactggctaatttatttatttttattttttatttttagtagagccggggtttcaccatgttggccaggctggtctcaaactcctgacctcgtgatccgcccacctcggcttcccaaagtgctgggattgcaggcgtgagccaccgcacccggcggcaaaataaactttctaaattaactaagacctctctcaaatttttgaggttcactggtaataattacatgattacatgtatgtcaaaactcatcaaattgtacacttaaaattgataaattttgttgcatgcaaattttccctcaataaagctgattaaacaaaacaaaaacagaagcaccaagattctagaaaaattgtgcctccagcagtagtttttgaatcttccaaaatccccaaataaaaatagagcaatcagacagcaaaaccaaaatcttgttgacagcattcaaacaaaactacgtgagataatgtgatgggctgaattgcatgcttccaaaattcgtatgtttaagctgtaacccccagtacctcacaatgtgagtgtatttggaggtgcagccttcaaagagatgattaagttaaaatgaggtagttagggtgggtcctaatcctatatgactgttgtccttattttatcttttttttttttttgagacaagagtctcactctgtcacacaggctggagtgcagtggcttgatcttggctactgtaacctccacctcctgggttcaacgattctcgtgcctcagcctcccaagtagtggggactgcaggcacgtgctatcatgcctggctaatttttgtatttttagtagagacggggtttcgccatgttgcccaggctggtctccaactcctgacttcaggtgatccacccacctcagcctcccaaactgctgggattacaggtgtgagccaccatgcccagcctggtgtccttattttaacaaaggaaatttggatatgctgaggcaccctaaggatgtgcacacgcagcgtgaatgccgtgtgaaaatccagcaagaaggcagttgtctgcaagccaaggagagagtccttaggataaaccagacctgccaacgccttgatctgtgacgaaaagcctctagagctgtgagaaaataaagttatgtttaaactacccagctgtggtaatctgttacagcagtaccagcaaactaatacaggaaatgtccccatgagcccccaaatataagcagatgagaacaatcataaacatcacaatacctgcatggtggacctgagcatctgtgaaggaggcagccaggggaagtgatggggcatctgaaatcatctgaaaacagaagagcctcaaaacgagtattaacacacagagggggttgggtgcggtagctcatgcctgtaatcccagcactttgggaggccaaggcaggcggatcacgaggtcaggagttcaagaccagcctggccaacgtggcgaaaccccgttgctactaaaaatacaaaattagctgggcatggtggcaggcacctgtaatcccagctactcaggaggctgaggcaggagaatcgcttgaacccgagaggcggaggttgcagtgagccaagattgtgcctctgcactccaacctgggtgacagagcaagattccatctcgaaaaacaaaacaaaacaaacaaaaaaacacagagggccatgctgacagcagcagcagagaggggttgaggcttttcctacaccaacaggaggggagtgcaagtggtccacaagggaagacctgaaggggccagtgaactcttcgctgtgacagctcttaaaactgacagccaaaattcctttccatctctaaataaatagataaataataagcaacaccagccaggcatggtggctcatgcccgtaatcccaacattttgggaggctgaggcgggtggatcacttgaggtcaggagttcaagaccagcctggccaacatggtgacaccctgtttctactacaaacacacaaaaaattagatgggcatgttggcgcactaaatcccagctacatggaaggctgaggcaggaggatcatttgagccttggaggtggaggttgcaatgagctgagatcccaccactgcactctagcctgggtgacagagtgagactctgtcttaaaaaataaaattaaatgtaattccagcactttaggagacagaggtgggccgatcacgaggtctggagtttgagaccaccctggccaacatggtgaaaccccgtctctactaaaaatacaaaaaggcatggtggtatatgcctttagtcccagctacttgggaagctcaggcagaagaatggcttgaacctgggaggcggaggttgcagtgagccgagatcgtgccattgaactccagcctgggcgacaaagcaagactccatctcaataaataaataaataaataaataaataaataaataaaatttttaaaaaaacaacagaaaagtatcaagcatgaagtccctaagagttgcaatttaaaagagagagagaataaggaacacaataacattcctcccgacaataaaagcgtatcagaaagccatgcccacaggagatcagaattggaacttgctatttcagactgagctaaaatttcattaacaaaatgatacaagatatgaaagaacaaaatcagttagaatcagaaaatgcgggaaatgaggtaataattcagaaaataattcaaataaaaatcatttcagaaatgaaaactaaactaaaaggaccaccacaaagaataaacacaacaaatgtttatgagaaactgaaggtaaaaatgaggaaaatttcttttgtttggagcaaactcgttaactgaaaaatgaggataatttcttttttttttttttgagatggagttttgctctttcgcccaggctggagtgcagtggcagatctcggctcactgcaacctctgctttctggtttcaagcgattcttctgcttcagcctcctgagtactgggattacaggcgcccaccaccacgcccagcttatttttgtatttttagtagagacggggtttcaccatgttggccaggctggtcttgaactcctgacctcgtgatccacctgcctcggcctcccaaagtgctgggattacaggtgtgagccactgcgcccggccaaaatgaggataatttctaaaattggatggaaatgaagaaagtgacaaaacaaaaaaaaaagacctgagagaaagagacaaacatagaagacagttcaagaagatcaaatacataaatagaaggttctaaagaaccaagccaaagcaaaagaaaagaacaaatactaaaatgttataattataataaaacattttctgaaataaaaaagatgtgtatcactagtgagaggtataagtgacttaaaaagcaacaaaaatcaggttgtcatttaccttctgacagttgtaaatagtaagtagaaaatagagtaacaggccgggtgcggtggctcactttggaggctgaggtgggcggatcacttgaggtcaggagttcaagaccagcctggccaacatggtgaaaccccatctctaaaaaaaaaaattcaaaaaaattagcctggcttgatggcgagcacctgtaatcccagctacttgggaggctgaggcaggagaatcgcttgaacccaggagacagaggttacagtgagccgagatcatgccacagcactctagcctgggaaacagagcaagactctgtctttaaagaaaaaagaaagaaagaaaaagaaagaaaagaaaatggagtaacatattttacatactcagtgcaagaaaagatatggcaaatattttatatccagcatagcaaaatcaaatacttttatcaacatatgagtgtcagggactcttgctggttaaaagacttaaaagatatgtcaagtaataaaaaagggaaggcaaaagcatttagggatgtgcaaatggataataatattataaaggaacacaaggaagtgatcactataaaagttaggagagggatgggctcagtggctcacgcctataatcccagcactttgggaggccacggcaagtggatcacctgaggttgggagttcgagaccagcctggccaacatggcaaaatcccgtctctaatagaaatataaaaattagccaggtgtggtggcaaacgcctgtaatcccagctactcaggaggttgaggcaggagaattgcttgaacccgggaggcagaagttgcagtgagccatgattgtgccactgcactccagcgtgggcgacagagtgagactctgtctcaaaaaaataaaaaataaaaaaaagttaggagagtggaactggttacttttaaggacagggaacacagaggaacttctagattatctagcaaagttctatttcttgacctgagttctggttacacaggtgtttgtcttgtaacaattcatttggctatatttttatgttatagttttgtttttctatatctatgttttattcttacaatttaaaaagtttaaaaacccaagtcttaggaattgtcacctttcccctccctcaaaacatggaaacatggaaaggaagaggcataaaggtcagtgctgaaattatctccttaaaatacgtatggggaggccgggtgtggtggctcacgcctgtaatcccagtactttgggaggccgaggcagatggatcacatgaggtcaggagtttgagaccagcctgaccaatatggtgaaaccctgtctctactaaaactaccaaaattagccaggtgtggtggcgggtgcctgtagtcccagctactcgggaggctgaggcaggagaatcacttgtaccagggaggcggagcttgcagtgagccgagatcgcgccactgcactccagcctgggtgacagagtgagactccatctcaaaaaaaaaaaaaagaagaagaagaaaatatgtatagggacctgcaaaaatgacatagattttcaaaagaatcgaataaaactttcatatgtgaaaagtacaataatgaaaattaaatattggccaaatgcagtggctcacaactgtaatcccagtactttgggtgggaggattgcttgatccctggagtttgagaccagcctaggcaacatggcaagaccctatctctaaataaaatataataaatgaaactaaaatacaataaaataaaattagctgggcatggtggtgcatgcctgctactcaggaggctggggcggaaggtagaggctgcagtgagctatgatcacaccactacactctggcctgggtgacagagtgagacctcttctcaaaaaaaaaaaaaaaaaaagatatgtaggacagagtgagaaggtcaaacatatttttagttggagttccaattaaacatcaatattagaagaaacaatagctggctgggtgtggtgactcactcctgtaatcccagcactttgggaggccgaggcaggtggatcacaaggtcaagagttcaagaccagcctggccaacatggtgaaaccctggctctactaaaaatacaaaaattaattgggcacagtggtgcgtgcctgtaatcccagctagtcgggaggctgtggcaggagaattgcttgaacctcagaggcagaggatgcagtgagccgagattgtgccactgcactccagcctgggcgacagagcgagactccagctcaaaaacaaaaagaagaagaaacaatagccgaacaatttccaaagatcatgaaagtccctaaaccattgactcaaatcccttaacctagacccatcatggacaaactgcagaaaaaccaaagataatgagaaaatcttagagcagcaaaagtaaaaaggataaattaccttcaaagtagtcattagactgacagctgacttctcatagcagtaatgaaagtcaagaatgaaacgatagcttcaatgtactggaaaaaaaaaagcccaatgtagaatttcatcaatggacatagggaaaatgatgtcaaatggaaatattgttatgcaaggaggaatggaaagcaatataggaattatgggggcaaatgtgaatgaatattgattataaaaagcaatatatgttgactgggcacggtggctcacacctgtagtagcactttcagaggctgaagcaggaggattgcttgagcccaggagttcaagaccagcctggacaacatggcgaaaccccatctctacaaaatgtacaaaaattagctggtcatagtggcgcatgcctgagaaagagataataaaaatacaagagaacaataatccacattgaaagtaggtgaatacatgtagctagagtagcctaagtactttctattgtcgtgggaatgaataaaggtgtgaactgcgaaagctgtaacattcaaaatagggtcacttgtgtcaaaccctggcaaattaagccaggggaaggccataaagagagagctctcacacacaatctgactgataacaggcaaatatttcacaagaaatttttccagactgcagcttacttcatgagtcacacaagcccagctacctgcttatacaaaaacacttgcctatttcaaaattggctcacagacccaatccaaaactgcaaggacctaaccattactctgagattacaaatcctacctggcaactaatgacacacaccaatcagaactctccagctcttgtaaaacgctgccagcaccaatacattttatttatttgtttgtttgtttatttatttagagacagagtctggctctgtcacccaggctgcagtacagtggcgagacctctgcctcccaggctcaagcaatcctcccacctcagcctcccaagtagctaagactacaggcgtgcaccaccatgcccagctatttttttgttttttgggtttttattattattattattattttttgagatggagtcttgctctgtcacccaggctggagtgcaacacactgcaacctccgccttccgggttcaagcgattctcctgcctcagcctctcaagtagctgggactacaggcactcgccaccatgcctggctaatgtttgtatttttagtagagaggggctttcaccatattgaccaggctggtctcaaactcctgaccttgcgatccacctgcctcagcctcctaaagtgctgggattacaggcgtgagtcgccaagcccggcccaatttttgtatttttagaagagacaggattccaccaagttgcccaggctggtctcaaactcctgggctcaaagcatccacccgcctcaaccttccaaagtgctaggagattataggcatgaggcactgtgcccagccaagtaaatttgatttaaaaacaactcacataacctcctctttacccaataaactctaaacttttcatttgttctctagacataccagacaccacgcgtctatgtatgtcctgaattgcagttctacttcttgtatattattcccaaataaaaccttttacttagcgattcgtctctatgtctttttacgttgacacaacttttttattttaagttttaatttttatgggtacctagtaggtgtacacatttatggggtgcatgagatattctgatacaggtatgcaacgcataataatcaccagggtaaatggagtatctgtcacatcaagcatttgctgtttatgttataaacatcccaattatacccttttatttttaaatgcacaataaattattgtcgactgtaatcactgtgttgtgcttttgacataactgttttagactttgatggattttgttatgcatggtattttctaaggtaattcttaaagcatagaaataatatatagaatttccaagctagtaaccataaacaacgacatgattattaaagctcctgaagaaaacaaggaggaaaaatatatatatatatgtatatataattgacaagataaacaaaagaacaaagatagatttaaaaccaaatatattagtaatcacatcgaataaaagtgaatataatactttacttaaaagacaaaggtggggccgggcgcggtggctcacgcctgtaatgcaagcactttgggaggccaaggcgggtggatcacaaggtcaggaattcaagaccagcctcgccaacatggcgaaaccccatctctactaaaaatacaaaaattagctgggcatggcggcgcgtgcctgtaatcccagctacttgggaggctgaggcaggagaatcgcttgaacccaggaagcagatgttgcagtgagccgagactgcgccactgcactccaacctggcaacagagcgagactccgtctcaaaaaaaaaaaaaaaaaaaagacaaaggttgtcagactggaattttaaaagttcaagtatagtccgggcgcggtggctcacgcctgttatcccagcactttgggaggccgaggcaggcggatcatgaggttaggagatcgagaccatcctggctaacacggtgaaaccccatctctactaaaaatacaaaaaaattagccgggcatggtggcgggcgcctgtaatcccagctactcgggaggctgaggcaggagaatggcatgaaccgaacccgggaggcagagtttgcagtgagccgagatcgcgccactgcactccagcctgggccacagagcaagactccgtctcaaaaaaaaaaaaaaaaaaaaaaaaattcaggcatattgtattctcaaaagccatctttaccttaagaatgcagaaacattgaaattaaagatggaggccaggcacagcggctcatgcctgtaatcccagcactttgggaggccgaggcaggcggatcacttgaggtcaggagtttgagaccagcctggccaacatggtgaaaccccgtctctactaaaaaaaaaaaaaaaaaatacaaacattagacgggcatggtggtgtgcgcctgtaacctcagctactcaggaggctgaggcacgagaattgcctgaacgtgggaggcggaggctgcagtgagctgagattgcaccactgcgctctagcctgggtgacaaagtgagacattgtctcaaaaaaagaaagaaaaagaaaaagaaattaaagatggaaaaactaacaataaacaagcaagttcatgtaactatactacttaaaataacagaaacttttttttgttgtttgagacggagtttaactcttgtcgcccaggctggagtgcaatggcgcaatctcggctcaccacaacctccgcctcccgggttcaagcgattctcctgcctcagcctcccaagtagctgggattacaggcatgcaccaccacgaccgggtaattttgtatttttagtagagacggggtttcttcatgttggtcaggctgatctgcccgccttggcctcctaaagtgctgggattataggtgtgagccaccgcgcccggcccaataacagaaactttaagacaaaatgcattgtgagacatatcttgcttcaaaatcctataatgatcttgtctgaggtagttaccttgcaagggtgttactgtttttcttgctccccttgtaatatccagaccataaaatgtaataaaaacctcagcattctctcaatgaccaattataaaatcaaacccacatatcaaaaatattgccagattttgaaactttatctaaaaataatatggagaatagatgaaagagcaccttcaccagagacacaacagtggttacaaaaaaatggaaagtgagaacataatgcagctatttggtgctccttgtgaccatgggcaacagatgaaaggttggggtgggagaggtaagggagagtaggttggtgtttgctgggctgattgatcctggctctcaagggggaaataggtttgaaccttctaaatgtaacatggatagaatgcaaagattcccctgggtcaactcctacctctgtcttttacaatagaaaaagttaatagaaaactatagtaactaataataattcggatcctatgaaagaagattcgagtcactttaaaaacttccaatcacagctgggtgtggtggctggctcatgcctgtggtcccagcttttgggaggccaaggcaagaagatcacaagcccaggagttcaagacgagcctgggaaacatagtgacacactggtgctaaaaaaaattaactggacattgcagcacatgcctgtagtcccagtcacttggcagagactgaggtaggaagatggcttgagcccaggacatcaagactgcagtgacccatgatcgtgcccctgcactccagcctgggcaacagagctacaaccctgtctgaaaaacgaaagaaagagagagagaagaaagaaagaaagaaagagagagagagagagagagaaagaatgaaagaaagaaagaaagaaagaaagagagagagagagaaagaaagaaagaaagaaagaaagaaagaaagaaagaaagaaagaaagaaagagagagaaagaaagaaagaaaagggggggagggacagagggagggaagaaaagaaaggcgggccaggcaaggtggctcatgcctgtaatcccagcgctttgaaaggctgaggcaggcagatcaagaggtcagcagtttgagaccagcctggcctacatggtgaaaccccatctctactaaaaatacaattagccaggcgtggtggcgggtccctgtaatcccagctactagggaggctgaggcaggagaattgcttgaacccgggaggcagaggttgcatcgagccgagattgagccatcacattccagcctgggcaacagagcaagactccgtctcaaaacaacaacaacaaaccctcccaatttgctaagtaaaagggaatgagtcacaactatgatttatagaaaaaaagactggagcatctatctgattaacatacagttatatattattactgattacttcttttttactcccctttttcctttatgtagcttttcacatgcttatatgtatggggtacatgagatgttttgataaaggcatacaatgtggaataatcacgtcaggggaaatgggatatccatcacctcaagtatttatcacttatttgtgttacaaacatttcagttctactctgttatttttaaatatacaataaattattgttgactgtagttaccctggtgtgctgtcaaatactatatcttattcatactatctaactatatttttgtccccactaactatccctactatccccttcccctgcccactatctttcccagcctctggtgaccatcattctactctctatctccatgagttcaatttttaatttttagctcccacaaatgagtgagaacacgtgaagtttgtcattctgtgcctggcttatttcacttaacataatgccctctagttccatgcatgttgttgcaaatagcagtatctcattctttttatggctgaatagtactccattgtgtatgtataccacattgtctttatccattcattgattgatggacatttaggttgcttccaaatcttggctattatcaacagtgctgcaataaacatgggagtgcagatatctcttcaatatatgaatttcctttcttttgggtatatatctagtggcaggattgctggatcatatggtagctctattttttttttttttttttttttttttgagacggagtcttgctcagtcatccaggctggagtgcagttgtgcgatctcccctcactcaagctccgcctcccgggttcacgccattctcctgcctagcctcctgagtagctgggtctataggcacctgtcaccatgcccggctaattttttttttgtatttttagtagagacagggtttcaccatgttagccaggatggtctcgatctcctgacctcgtgatccacccgcctcagcctcccaaagtggtagctctgtttttattttcttgaggaaactccatacttttctccatagtagctgtactactttacattcccaccaacagcatatgagggttctcttttctccacatcctcaccagcacttgttattgcatgtcctttggataaaagccattttatttttattttattattattattatttttgggacagagtttcactcttgttgcctgggctggagtgcaatggtgcgatttcggctcactgcaacctccacctcctgggttcaagcaattctactgcctcagcctcccgagtagctgggattacaggcacccgccaccacacccggctaattttgtatttttagtagagattggggtttctccatgttggtcaggctggtctcgaactcctgacctcaggtgatccacctgcctcggcctcccaaagtgctgggattacaggcataagccactgggcccagcttcctaaaacccctttttaactggggtgagatgatatctcattgtagttttgatttgcatttctctgaggatcagtgatgttgagcaccttttcacatatctgttggccatttgtatgtcttcttttgagaaatgtctattcagatcttttgcccatttaaaaaatcagattagattttcttcctgttgtttgagctccttgtatattattaatcccttgtcagatggatagtttgcaaatttttttcccatgctgtgggttgtcccttcactttgttgattgtttcctttgctgtgctccagaagctttttaacttgatgtgatcccatttatccatttctgctttcattacctgggatgttggggtatttattactcaagaaatctttgtccagaccaatatcctggtctttaatcttttttttttttcttccctggctggaatgcaatggcgcgatcttggctcactgcaacttccgcctcccaggttcaagtgattctcctgcctcagcctccaagttgctgggattacaggctcgcaccgccatgcctggctaatgtttttcatattttattttttgagacggagtcttgctctgtcgccaggctggagtgcagtggtgtgatctcggcttactgcaacctccacctcctgggttcaagtgattctcctgccttagcctccaaagtagctgggactacaggcgcgtgccaccatgcccagctaatttttgtatttttagtagagatggggtttcaccat[137 bp omitted]cccaagctggagtgcagtggcatgatcttggctcactgcagcctctgtcttccaagttcaagcgatcctcccgcctcagcttccagagtttctgggattacaggcacatgccaccacacccagctaatttttgtattttagtagagacggggtttctccatgttggccaggctggtctcaaactccagacttcagctgatccacctgcctctgcctcccaaagtgctgggattataggcatgagccacaatgcctggcctcattttgatttgatttttgtatatggtgagatgtaggggtttagtttcagtctgcatgtggatattgttctcccagcaccatctactgaagagactatcgtttccccaatgtatgttcttggcacctttgttgaaaatgagttcactgtagatgtacggatgtatttccaggttctctattctgttccatcggttgatgtgtctgtttttatgccagtaccatgcagttttggttactatagctcagcagtataatttgaagtcaggtaatgtgatttctccagttttgttctttttgcttaggatggctttggatattctgggtcttttgtggctattttagggctattttttctatttctgtgaataatgtcattggtatttttatagggattgcattgaacctgtggtttatttctgtagtttacacttaaaagtaagatgacagaatgtctacacagaatcctcacagatataaagtatagatattgcccatcacattttcagttgaatgaaaatgggatggaaataggaatagaaaatctattttctataaagtaggaatagaaaatcatagcctgtactagagaccatggagaaattaagggtccaatgaagggaggtaatatacacagttttaacacatttcaccaaggcaataagtcatttctcttataacacacaaacaagagtagggctaaaaataggaagaagaaaacaaaatctcaaaaactggctgttctgtaaaaaatgagtaaaatatggttaaaaaaaaaaagtgctgcccaatacccactctcaccaggtctgtggtctgcatatgcaataagaaaataagatggcccaggcgcagtggctcatgcctataatcccagcactttgggaggccaaggcgggcggatcacaagttcaagagatcgagaccatcctggccaacatggtgaaaccctgtctctactaaaaatacaaaaattagctgggcgtggtggtgtgcacctgtagtcccagctactcaggaggctgaggcaggagaatcacttgaacccaggaggcagaggttgcagtgagccaagatcgcgccacggcactccggcctggcgacagagggagactccgtctcaaataaaataaaataaaatagatataaaaaatattgtgagataggtatgtcacctttatctgcagattatataactatagagcccaaaagaatctatcaccttataagcagaactctaataaattttcaggtattactagcatattttaagtattgtgagacatcacagtagatggtgttattattagatattagagagtcaagaggatgaagagttataaaagaaacctcaagatgtgttaatgaattccattcagtgtcaattgtttattcatgtaggatactctgcatttaaactgaatgaaattcaaaatataatcctaatggggttttcattggaaaataaatgagtcaaaaattctcatgaagaaacatctttatttccaaataataaactatatattaataatatatacatacatctttatttccaagtaataaaagctattgaaaagtgtcaaggattgctagaatatggagaacagaaatagatgtgagcatttaatatacaactgatagtattttaattcagtaggagaaaggtgaataatagttacttctggcataactggttttattcctggatagaaacaagtctgacatcctgcattagatcgtataatcaattcctgatgtattaaaatattaaatctctgtgtatacacactcacagaatcacatatatgaaaaactgcactccactcctttattctcttgccctctgaaatcttccagaagcaaaaccttcctaggaaacatagaaaacactggaaatgacgccgggtgcggtggctcatgcctataatgccagcactttgggaggccgaggagggtggatcacctgaggtcaggagttcgagaccagcctgaccaacatggaaaaatgccgtctctactaaaaatacaaaattttccaggcgtagtggcatatacctgtaaccccagctacttgggaggctgaggcaggagaatctcttgaacccgggaggcggagattgcagtaagccaagattgcgccattgcactccagcctgggaaacaagagtgaaactctgtctcaaaacaaaacaaagcaaaaacactggaaatgacttgggaagcttattttatagaaataaaacagacaagaatacaaagtgtttgttgcagcattacttttagatggcaaaaaagcgcaaacaatccataatatcacaattgggaaagtggttgaaaaggcattggtaaataacactgtggaacatactgtaaccatcagaaagactgttagatcatcatctattgaaggaaaatccaaaatgtacagttgaatgtaaaaaagcaaatttcagggaaatgtatagttatccatttttctgtaaaaacataataaaataattgtgtgttaatgttttagcatgaagaaatatatgggtaatatacacaacctttaaatattattcagaagaaaattgacagaggggagggaatgaggaacggagaagggcaaagataatcattttttctttcttttttttttttttttttgagacagattttttgagactctgtcatgcaggctggagtgcagtcaggatctcagctcactgcaacctccgcctcccgggttcaagcgattctcctgcctcagccttccgagcagctgggactacaggcacatgccaccacgcccagctaatttttgtatttttagtagagatggggtttcactatattggccaggctgccccctgccttggcctcccaaagcactgggattacaggcgtaagccactgtgcccagccccttttctttctctttaatggtattgtttcattaatttgggtgcaaatgcactatctctataattttagatgaagaactttataaaagacataagcacacaagaaaagaaagtaaacaaaatctcatttggcagttttcattttgataacgcaaaacattacaacagtccatttttagtaattctctcatttgcaggtatttttgctcactctacttttctcaaatttattatgaaatattttacttccttatgccagtaaagtaaagtaacacaatgttcagagagacccgtctacacaggatctaagaaaaaaggaagtggggcataaaataacagttctacagacataaacttcatccttccacatatgcgatctgtccagcgtggggagctgcttgctgagcatgttttgagcacagggaaggcccatttcaaaacactaacttaaccccaaacaaagctacactgtggactttttttttttttttttaatagtctcattctgtcgctcaggctgaagtgccatggcgtgatcttggctcactgcaacctccacctcctgcattcaagtgattctcctgcctcagcctccccagtagctgggattacaggcatgtgccaccatgcctggctaagttttgtatttttgagtaaaaatggggtttca[140 bp omitted]ttttccttagaaagaaactggatttggtgcttcattagtaatagttaactgatcacatgctaatttttccctgttctctgtgtttatgagagtctttgaagagtcctaattttcttggagtcaatattgatgtatattttccttaaaaaccattttgtttaaattttcaaacatattagaaaaaagcataatattcaacagaaccttttaaatctgtaactatgtttctatctctgtccattttttaaatatgatgctgtttctcttttcatactttttttcctcattagtgcaccaatattttgcttatgttctcttttcttttttactgggtatataatgcgacaaaaagagtattagtcggaataaagtccttcacacacattattcacagtactttcccccccaacacctaggattatttcatgttcaatagtaagtacatgatgatgggaaattttcttaacttgttaccttcaaagggtctttcttcagtcaaacaccctgcctaatggtgactaagttctgcagaagttaaaaagcctttctacaaataataatactgatgatgatgaatataataacgatgactaacattcagtgagtatgtatttatcatgtcaggcacaattctaagcactttatcgatcttaattcatttaatcctcacaaagcattatgaggtaggtattataattatcccccattttataatttttactgagacacgcatgtatatatgaacagaaaaatgatcagcaataaataatgaactgataaagactatcctttgggatatggtcaaagggtacatttgcctttttgtaatgtttgcatcttttataaggaaaatatattcacacattacttctgcaattaaaagatatgatacaaagatgtgcttagggagaatgtccagcagggacttgtattttggcatgtattatggcaaaatatctagaggagactacgatatccaccaataggatttcataagtgatattacagtaacacaacaaaacaccatgaagataatgaagaatctctattgagtaaaatgtcgttcatgaacatttttacaataagaaagccttaatgttataaagaacaaaaagaataagccatcttcaaaaataaagaggtcacttctcccaggtactaaaggtatttttaaaatagtatacaaatcaggatgtaaacagatgaaatttatagccatataaatttaatatggattaaaatactaagaatgtaacaattagagaaattaggggaaaaaatgacaatcacaggactacatttctacaaaaattctctgacgttaagaaggttagaaaggtgttaaaagtgctgtcattttcagtatgacagactgaattatctatcatattgctagactgaattatctgatgtcaagagaagtaagcgtttagttaagggcttccaaagtatattctattcatagagtatttctccaacattatttttcccaggctgaataagctgtagtccacaaataaaatgtttctacattattctatctagaggaattattaacaagataaattctgttttgagccataattaaaagcctccctacacatttcatatattctgtttcatcaccagtacaaattttgatgctgaataagttgtgggtcataattaaagttctttccacattccctatattcatagggtttctcactagtatgaattctatgatgactaataagctgtgaactctgagaataagccttcccacatatcttacattcatagggtttctccccagtatgaattctctgatgtctagtaaggtctgagccagaacgaaaagccttttcacattccttacattcgtaaggtttctcacctgtatggattctttgatgtttaataagttgtgagctctgactaaaggcattgccacattccttacattcatagggtttttccccagtatgaattctctgatgttgagtaaagtttgagccactactaaaggccttcccgcattctttgcattcataaggcttctcacctgtgtgaattctctgatgtcgagtgaagtttgaaccactactaaaggctttcccacattccttacattcatagggtttctcaccagtgtgaattctgtgatgtcgagtaaggtctgagccacaaataaaggtttttccacattccttacattcaaagggtttcttgccagtatgaattttctgatgatgagtgagtcttgagggatgtctaaaggactttccacattccttacattcataaggcttctcaatggtatgaattatctcatgtgtagcaaactgtgagccatgtctaaaggttttcctatattctttagatgcacagaatttctttttactgttaatgatttgctgtaatgtgaaggatggatggtgactcaaagtgggcagatcttcatgagtgaataccaattgattgaaatgtcccccctgagagccgagttctttcttaaactgccgattacattcccaatcatctctgaaactggagcactgaaaatcacgtcttgtgagtttttccattatttcccactgggttgattctatttcataaatttctttcttcagaaataatttcttggtctcacatcttgattccaggactgaaagaaaatatgaaagtaatcactcacatttttcttgtttgggagaaacaaaacttcaatcaatatgggagaatttaaccgaattttttttacaaatggatgaggaaaaaagagagttagaagacaggttacataataagatgagggtagtgattaggaaaacaaagtaagtcactggttcccaaacattgctatagatcagaattactttgggaagcctgctaaatatacacatgctttagtcctatctcccttgttaaaggatgactctaatcatacacacacaaaatatctcattgcatatatacacacagacatataatagcatctcatagtatgaattataaaataagggaaatggccaggcatggtggctcacatctgtaatcccagcaccttgggcgggtgaggcaggcagatcacttggtcaggagtttgagatcagcctggctaacatggtgaaacctgtctctactaaaaatataaaaatctagtggggcatggtggtgtgtgcctgtaatcccagctactggggaggccgaggcacgagaattgcttgaacccgggaggcagaggttgcagtgagccgagattgccactgcactccagcctgggcaacagagtgagtcactgtctcaatagatagataaataaataaataaataaataaaggaatgatcacactgttaacagggctattgtcggatgaaatgaatatgcctaatggaaaattcccagagatcagtaaactatggcctatggccctgcacccatttttataaatgaagttttattagccatacttgttacgtattgtctatggatgcttttgcgctaaaagggcagaagtgagtagttatgatagagaatgtgtgaactgcaaacctaaaatacttactatttgcctttcaagaaaaagtttgccagcccctggttagatatgcatcgtctaatacagtagccgctagctacatgtggcttttaaaatttcaaataatttaagtaaaatgtgcatttcattttgaaataaacagctgaatttgaaaattcagtttctcagtcacattattcacatttccaatgttcaacagccaaatgtggctggtagcttttgtactggaagtctgtacgaaatatcacaaatataaaacatttccatcaccactgaatgttctcttggatagccctggtctggattctgtaacaggagggccagagcactttaaaaaatgataaggaactagagggtgacaatccagaaaaaagcctagcttaagaaaagtcaagtgtggaatgaacatagtatgagtggtagataggactcatttgtggacagatatggtatatgtttggggtttgatgaaaatagtgtttgtcgtgtaattctgagatgctgacctttgttaaagagaagaggggacttaacaagtacatgatcactatagtagtaatgactgactggcagaaaagacatttgtaggttcaagagaaggggagagagtaaaatggaaggcagtgtatggtactgacagatcagagatactagattcagttacatgcgttttatactcaaacttgaataattataagctttgttttcttgggcaaattagttcaaccttccaaacctgcagttctctgtctaatacaataggaatgatagcccttacaactgttgtgaggattgggattaatgtttgtaaatactatggaagaatttctgccaggcacagtggctcacgcctgtaatcccagcactctgcggggccgaggcgggccgatcacgaggtcaggagtttgagaccagcctgaccaacatggtgaaaccctatctctactaaaaatacaaaaattagccgggtgtggtagcacatgcactgtaatcccagctactcaggaggctgaggcagaagaattgcttgaacccaggaggtggagattgcagtgagccaagatcacaccactgcactccagcctagggaacagagcgagactccatctcaaaaaaaacaaacaaacaacaaaaaaaagaatttccatacaaaaatggggacattaggcccgaccccttgactcgttaaaaaaaaaaaagggagaatagttagaagacttgaaagtcactgactcttagacaaggaaatggaggggtaaggaaggtacagctttgtaaactattataatatacatgtaatacaaataaatttttacaagaaataatttggtctggttacagagggacaggatctcatctagtattcttatcagttacccatagagaaagaaatgactacggaatgagatatgatgaaaagaaaaaatgagtatagcaaggtggttgagaaaactgaaggctttagggttgtaaaagaggtctgaattccagactttttaactagctgagaggcataaccaaattatgaaacctcaatgaatattgtttttatcatctgtaaatctgtcaagtgtatgacactagtaggtactcaatattttagtggaatagtgttatgaattaagtagggaagatagtttgaaatcatactagatcatatggtaaaaacgtacatcatgcaatctttctctgatagctataaggcatttaatctgatcactgaatcctaaacaaacaaaagacgtgagaggaaatcaacactagatttaacttgtaagaaacatcaaaaagagttcttcaagtagaaagaaaaggacactaacaatataaaaatataaaactcactgtaaaggcaggaatatagttatattgagaacactctgataatgtaataatagtgtataaatcacttttaactctagtataaaagttagaagacaaggctgggcacggtggctcacacctgtaatcctagcactttgggaggccaaagcgggcagatcactaggtcaggagttcgagaccagcctgcccaatatggtgaaaccctgtctctactaaaaatataaaaattagctgggtatggtggcgtgtgcctgtaatcccagctactcagcagggtgaggcaggagaactgcttgaacccgggaggtggaggttgcagtgagctgaaatcttgccactgtactccagcctgggcaacagagcaagactctgtctcaaaaaaaaaacaaaaaaacaaaaaaacaaacaaaaaaaaagttaaaagacaaaggtactaaaaataaataaactggcggggcgctggtggctcacatgtgtaatctcaggactttgggaggccgaggtgtgcagatcacgaggtcaagagattgagaccatcctggccaacattgtgaaaccctgtctctactaaaaatacaaaagttagctggctgtggtggtgtacgcctgtactcccggctactcaggaggctgaggcaggagaatcacttgaacccaggaggcagaggttgcagtgagccgagatcgcgccactgcactccagcctgggtgacagtgtgagactctatctcaaataaataaataaataaataaataaataaataaattaattaattaaaataaaataaaaataaaaataaataaacctacaatcatttgctaatagatacacaatatataaaagatgtacattgtaacatcaataatgtaatgtgggtggagaagttaaagtgtagactttttgtatgtggtcaaagttaagctattattattattattactattattattatatttttgagaaacagggtcttgctctgtagcccaggccacagtcctcactgtagcctcaacctcctgggctcaagggatcctcctacctcaacctcctgagtagctgaaactagacatgtgccaccacacctggttaatctttttttgagacagattcttgctctgtctcccaggctggagtgcggtggcacaatctcggtttgctgcaacctctgcctcccaggttcaagtgattctcctgcctcagcctcccaagtagctgggattacaggcacctgccaccacacctggctaattttttgtatttttagtagagacaaagtttcatcatgttggccagactggtttccaactcctgacctcaagtgatccttaaacatttcggtagagacagggtctcactatgttgctcaggctggtctcaaactcctgggctcaagctatcctcccacctcagcctcccaaagtgctgggaatacaggtgtgagccaccatacccagcctaaagttaagttattattaacttacaatagactgttataactatgagatgttttaaatatgtaagccttatggtaaccacagagaaaaactctctagtagatacactgaagacaaagagaaagacatcaaatcataccaccataaaaaaatcaaatcaaaaagaaagagtgagataggaacaaagacactataaaacagtcaggattagctcggcagaggggtgcatgactatagccccagtaacttgagaggctgaggcaggaagattgcctgagcccaggagttcaaaactgcagtgagttatggtcatgccactatactctagcctgggcaatagagggagacctcatctttaaaacaacaacaacaacacaaaagaagaatcataagagactactatgaataattatatgccaacaaattggataaactaggaaaaaaatggataaattcctagaaacaaaactaccaaacctgaatcatgaagaaagagaaaatctgaacagaccaattatgagtaggatagttccatcagtaatcaaaaacctcccaacaaataaaagacaaagacttgatggcttcactagtaaattctatcaaacacttaaagaagaattaactccagttctcctcaaactcttccaaaatgttgaagacggaacacttccaaactcattttatgaggatagtattaccctgataccaaaaccagacaaaaaatctacaagaaaattacaggccaatatccctgatgaacacagatacaaaaatcctcaacaaaatactagcaaatggaattcaacagcacattaaaaggatcatgcaacatgatcaagtgagatttattcctaggatgcagggatgtttcaatataagcaaagcaatcaatgtgatacaccacatcctaaaaccatatgatcatttcagtagatataggaaagtcatcttacaaaattcaacatactttcataatcaaaactctctcaacaaattaggtgtacaaggaatttacttcaaaataataaaggccatatatgacaaacctatagctaacattatcctcaacattggaaagataaaggtttttcccctaagatcagaaacaagacaaggatgtccactcttgacactctgctcaacatagtaccaaaagtccttttcattccttttaggcaataaaaaggaataaaaggcatccaaattcaaaaaaaccctaggggatctaccataaaactgttagaagtaataaatgttatttatttgcaactcagtgtgctcccacctgtaattcccgcactttgggaggccgaggcgggcagattacttgaggtcaggagtttgagaccagccgggccaacatggcaacatcccgtctctactaaaaatacaaaaattagccgggcaatggtgggcacctgtaatcccagttactcaggaggctgaggcacgagaatcgcttgaacccaggagatggaggttgcagcgagccaagatcatgccactgcactccagcctgggtgacagagcgagactctgtctcaaaaaaaaagaagtaataaggcctcatgcagtggcttatgcctgtaatcccagcactttgggaggccaaggtgggcggatcatgatgtcaggagatcgagaccatcctggctaacacggtgaaacctctctctactaaaaatacaaaaaattagccaggcatggtggtgggcgcctatagtcccaactactagggagactgaggcaggagaatggcgtgaacccgggaggccgagcttgcagtgagccgagattgcaccactgcactccagactgggtgacagagcgagactccatctcaaaaaagaaaaaaaaaagtaataaatgtatgtgtattcagtaagatacaaaaatcggttgtttctatacactagcaacagattatcagaaaaagaaatcaagaagacaatcccatgtataataacatcaaaaagaataaaatacttaggaaaaaatttaacaaaggaaatctgtatatggaaaactataaaacactgatgaaaaaaatgaagacacgccaggcatggtggctcacgcctgtaatcatagcactttggaaggccgaggcaggtggattgcctgagctcaggagttcaagaccagcctgggtaacacagtgaagccccatctctactaaaatacaaaaaaaaaaaaaaaaaaaaaaattagccgggcgtggcagcatgcacctgtagtcccagatactcgggaggctgaggcagaagaattgcttgaacccgggaggcgtagattgcagtgagctgagatcacaccactgcactccagcatgagcaacagagtgagactccatctaaaaaaaaaaaattgcattaaataaaaaaggggggtggggagctaggggagggataggattagaagaaatacctaatgtagatgatggggtgatgggtgcagcaaaccaccatggcatgtgtatacctatgtaacaagcctgcacaatctgcacatgtatcccagaacttaaagtataataaaaaataaatgaagacaaaaataaatgaaaagatattctgcattcataaatgggaagaattaatattgttaaaatgtccatactacccaaagcaatctacacattcagtggaatccctaacaaaattccaaaggtattttcacacaaatagcaaaaacaatcctaaaattcatatggaaccataaaagaccctgaagagtcaaggtaatcttgaacaagaagaacaaagctggaggcatcactacatccgatagatttcaaaatagattacaaagctgcagtaatcaaaacagcacggcactggcataaaaatagacacatcaaccaatggaacagaatacagaaccaagaacccatacagaacccatgcatttatggtcattggattttcaataaagatgccaagaacacacaatggggaaaagacagttcaataaatggtgatgagaaactggatagccacatgcaaaagaatgaaattgaattcctattgcatacatatacgaaagtcaactcaaaatggattaaagacttaaacatgagacacaaaactaaaaacacagaaaagaaaagcaaaaaatagaaaaatatgattacatcaaactcaaaagcttctgcacagcaaaggaaacaacagagtgaagagactatccacagagtgggataaaatattttcaaaccttgtatctggtaagatgctaatatccaaaatgtataaggaactcaactcagtaacaagaaaacaaataacccaattaaaaaatgggcatttctcaaaagaagacatagaaacagccaataggtatatgaaaaaacactcaacattactaatcatcaggaaaatggaaattgaaaccacaatgaaatatcacctcattgctggttactgtggctcaggcctgtaatcccagcactttgggaggccgaggtgggtggatcacttgaggtcaggagttcgacaccagcctgaccaacatgatgaaatcccatctctactaaaatacaaaaattatgtgggcttagtggagggcacttgtaatctcagctacttgggaggctgaagtgggagaatcgcttgaaccccggaggcggaggttgcagtgagctgagattgcaccactgcactccagcctgggcaacaagagtgagactccgtctcaaaaaaataaacaaacaaacaaaaatcccctcacacctgtcagaactgctattatcaaaaggacaaaaaataacaagtgttggaaaggatgtggcaaaaagggaatccttggacactgttggtggcataaattgaaacagccattatggaaaacagcatggaggtttctcaaaactaccctataactcagcaagcttacttctgggtatatatccaaatgaaatcaaatcagtatgggggaaaaaaaatctgcattcttatgttcattgcagcatcattcatgatagccaagatatggaatcaatggataaattgataaagaaaatgtgatgtgtgggcatatatatgtatacacacacacatacacatatacacacacataatggaatgtgtgtgtatatatacaaatacacaaacactggaatattaagacttaaaaatgaagaaaatcctgttattttcaacaacatagatgaagctggaggacatatgtgaaataagccaggcacagaaagacagatactgcagtgatctcacttatatatgaactctaaaacgttgaactcatagaagaagagagtagaatggaggtcaccaggggttgggggacggaggaaagaagatattggtcaaagggtacaaagttctagttactcagaataaaaaatttctggagatctaatatacagcattatatattaatagtatgtactgccatgtaagtacataccattaatggtaataccagtacagaacgtataccatagtaactatagtttataatactgtattgtatacttggaatttattatgggagtagatcttaatgttcttaccacatacacacatatacaaattggtaactatgtgatgtgatagatacattaattggcttgattatggtaatcatttcacaatgtatacacatatatcaaaatacctaactgtatactgtaaatacatataatttttctttttgagacaaagttttcactcttgtcgcccaggctggagtgcaatggcgcgatcttggctcactgcaacctctgcctcttaggtttaagtgcttctcttgcctcagcctcccaggtagctgggattacaggcatgcaccaccacgcctggccaatatatataatttttatttgccaaatatacctcaataaagctagggaaaaagctggaatgaattgtttaaaaaactttcagagaaggatgaaagtgatgacagaaaataataagtcatagggaagaaaaattgatgtaagaaataaaatgaatgtcaaatatgaattctggaaggaaaatatggcaatgatatagaaccctaataaaacaaatttccagggttgatgaaaactcttagtattcagatggttccctttttgctgagcaatatatatgaggaaagaggtttttgttttgttttgtgtttgcctcagcctcccaagtaactgggattacaggcatgagacaccatgcctggctaatttttgtatttttagtagagatggggtttcatca[139 bp omitted]gactggagtgcaatggcttgatctcggctcaccacaacctctgccttccaggttcaagcgattctcctgcctcagcctcctgagtagctgggattacaggcatgcgccaccacgcccggctaattttttgtatttttagtaaagacggggtttcaccatgttggccaggctggtctcgaaccccaacctcaggtgatccacccgcctcggcctcccaaagtgctgggattacagtcgtgagccaccgcgcctggccacctattactttttttttttttttttgagacagaaccttgctctgttgcccaggtgagagtacagtggcgtgatctcagctcactgcaacttccacctcctgggttcaagagatcctcctgcctctcagcctcccaagtagctgagatcatacgcagctattttttttgtatttttagtaaagacgaggtttcaacacgttggccaggctgatctcgaactcctgacctcaagtgatctgcccaccttgacctcccaaagtgctgggattacaggcataagccactgtgcctggctttcataggatttaaagaaagacctagggtctcatagaataatattcagaatgccttaggataccatccaaaatcactcaacatatgaagaatgaagaaaattttaacttacatggcaaaagacaacagacaccaaaataaaggtgactcatgttggaattatcagataatgactttaaagcagctattttaaaaatgcttgaataaggaatcatgcacactctgcaaaccaatataaaaatagaaagtttcagcaaaagaatagaatatataaagaagaataaacaagttttagaactgaaaagtgcagtagccgaaataaaaaccactggctaggctcaacagcagaatggaggtaataaagtcaataaacttgaagatagttcaaaagaaattagctaatatgaatagcagcgaaaaaaagatggaaaatgcaaaaagaacatagcctctgggaatgtagaacaagaaaagatttaacatttgtgtcatcagggtttcagaaggagaagagatagtataggactcaaaaaagatttgaagaaataatggctgaaaacttacaaattttgtgaaagataaaacaagcaaagccattttgagaagctcagccaccccaaataggataaacccaaagaaatccatactcagacacatcataatcaaactgctgaaaatcaaagacaaaataaatagtgaaagaactgtaaaaaaatatatattacttctgggtgaacaatgatttgaatgactggattgctcttcataaactctggaggccagaaaaaaattggaacaataatttattgtgctgaaaaaaagagttgtgaatccagaattttgtatctaccaaaaatatccttcagtaatgaaggtgagattaagaaaagtaatactgcaaatgtacattgcagctcaggctgtgccctcagagtctgtgtgagagtaggcaatagtggggacagtggttagtaaaagagcttgtaccccttctcaaaggggttaagtgcttgttaaatccaggagacagctgtcatgtgagaatgaaggtccagtgctgctttccagctctccaaggaaaactagaaatccagatttctatattaaatcccctgatagcttgaggctggtaactaattcagaacattagagaactgtaggggcagcaccaaacacaaacatgtgtaggatacaccctgagttactaggttgttacttcaatggagttttctgtttctttgaacttcagaaattataccaagatacatctaattaaaactcttggctggacgcagtggcttacgcctgtgatcccagcactttgggagtccgaggcaggtggatcacctgaggtcaagagtttgagacctggccaacacggtaaaacctcatctctactaaaaatacaaaaaaaattagttaggcttagtggcgtgcacctgtagtcccagctactcagggaggctgaggcaggagaatcccctgaacccaggaggcagaggttgcagtgagccaagatcacgccactgcactccagcctgggcgacagagcgagactctgtctcagaaaaaataaaataaaataaaataaaaaaataaaataaatcctatggagatggttcatattttgttttaacaggtattgaccatgttgggtacaggctgcaagttccaacaaggcttgtgtggactgtgattccagtgtcagttttcaaggcctttgcagtgttatttggatttgtcctgtgtgtacaccacccaatccaatctgaacttacactttagttcttaaagtctttgatatgttatttagggacagatccacatatattcgggcaaaaatgagcctaagagttcataaaaactgagttttttgaactttgggtttttttttttttttggagatggagtttactcttgttgcccaggttggagtgcaatggcatgatctcggctcaccccaacctctgcctcccgggttcaagcaattctcctgcctcagcctcccgagtagctgggattagaggcatgcaccaccacgcttggctaattttgtatttttagtagagatggggtttctccatgttggtcaggctggtcttgaactcccgacttcaggtgatccacccacctcggcctcccaaagtgctgggattacagacatgagccaccatgccggggccaactttgggttttttgaacttgaacataggttgcttttttgaacttgttcctttctgggatcttcttaatactttctagttccctggagctcccctattcagttctctagtcctaacgctggggctttagttacctccctctgctatgtattttctgcaactatgcctgggtatggcaggaggaaacagagaaaaaaagtaataggggttcactccacggcaactctaacaggaaaagaaggttcctattccttgtagttttagatacctgcaggcccccactgcttccactattgctgctgctgctgtgagattgtctggaggctgggacatgcaaaaacaggggggaaaatatagacatatatttgtgtatatatacatatatgtatatatgtacatatgtatgtgcatatacacacaagcaagagattgccccaatctctcttggtgttaagaatcccatttcctcccatcctggctaacgcggtgaaaccccgcctctactaaaaatacaaaaaattagccaggcgtggtggggggtgcctgtaatccaagctactcgagaggctgaggtaggagcatcgcttgaacccaggaggcggaggttgcagtgagccgagactgtgccactgcactccagcctgggtgacacagcgagactctgtctcaaaaaaaaaaaaaaaaaaaaaaaaaaaaaaaaaatcccatttcctgtgccttctgccaaaactggaaggcttatcttgggccagacgcagtaatcccagcactttgggaggccaagatgggaggactgcttgagcccaggagttcaaaatcagcctagataacacagggagacctggtttctaccaaaattttaaaaattagctgggcacggtggcacatgtctgcggtttcagctactcgggggctgaggtaggaggattgcttgagcccaggaggtccagactgcagtgagctgtgggttcaccactacactccagctggaattatctctgtctacatcctacgcaataaacaactcaactgcatttgtagacccccaaaaatatatagaaaatacctagaaataaaatatcaaatgaactataagcccttttttgagataagtttataaaaatacactgaaataccatcaagaaggcctaaataaatggagaaaagtactgtggtcatggcaaacatgatttaacgtaataaagatatcagttactactaaagtgatctacaaattcaatgtaatttctttttttttttttttttttttttgaggcagagtctcgctctgttgcccaggctatagtacagtagtaccatcttggctcactgcaacctctgcctcctgggttcaagtgatgctcatgcctcggactcccaagtagctgggacaacaggtgtgcgccaccacacctggctaatttttgtgtttgctttttttgggtttttttttttgagacagagtctcactccatcacccaggctggagtgcagtggcacgatctcggttcactgcaacctccacctcccgggttcaagcaattcttgtgcctcagcctcccgagtagctgggattacagttgtgtgctatcacacctggctagtttttgtatttttagtagagcctgggtttcaccacgttgtccaggctggtctcgaactcctggcctcaagtgatctgcccacctcggcctcccaaagtgttgggattacaggtatgagccaccacacccggccaaattcgatgtaattatacatattaaaaactcaacattttaaataaaacataaagtaatttttaatactatatgaaagatcaaagagataagtataaccaaaatatgcctaaagaaaaggtggagagatgtgtcctatcagaaatcaagacttgttatataaacaagagtaattaaggcagggataaaaaggctcaatgtaacaagaaagacccaatgcatatatgaaatctgaatatatgacagaggagcattgttgatcaatgaagaatagacggagttttcatttgagagggaaacataattttttttttaagagacggtgtttccctctgttgcccaggctggttttgaattcctgggctcaagcaaccctcctgccttaacttcccaaagtgctgggattataggcatgagctaccacacccagccaattcgttttctatataggaaaaataactgatctccatctcatactattcataaaaatcaattaaagttgcattaataggtctttaataagaaagcggaaacataaaaattcttgggagttcgagatcagcatgggcaacatggcaaaaccctgtctctacaaaaaatatgaaaagttagccgggagtgatggcatgcgcctgcagtcctgggaggctgaggtgggaggatcacctgagcctaggaggtagaagctgcagtgagccgtgattgttccagtgcactctagcctgggtgactttttctgtcttaaaaaaaaaattttgggaatcaaagtagaaaattgggctaggaaggggtttctgaagatccaaaaagtataaagcatacaggaaaaagataaaaatgtttataagcaatatataatttaaccactaaacatacaatttgacaatattaacacaaagaattactgttcttcaaaagatatcataacgaaagtgaataaaaaagacacaaactggaaaacatatctataaaacatgcgattgatcaaaaatgagtatctagaatttatacaaggaattcctacaaatcttaggaaaaagacaaattagcctaatacaaaatggatcaaaatgacattatacagaagagacactaatgaccaataaacatatggaaaggtaatcatcttcaaaaatgaccagggaaatttaatttaaaattataaaataagagttcatactcaccaatcagattattaaaagatgaaaaaataatatcataaggaaagatggtggaacaaaagtacttccaacgtaaactaatacaacacttggaaaacagtttggcatcaccttgcaaagctgagtaagtacgtacaccaagatcctgcaatggtattcctaagtgtatttcctaacaaatctcttgcacatgtctaagtctgcagatgtaaatattattgtcataattacatgtttacatatatacattctatatattctactatgtttataaatacttttttttttgagacggagtcttgctctgtagcccaggagtgcggtggcacgatctcaactcactgtaagctccgcctcccaggttcatgtcattctcctgcctcagcctcccgagtacctgggactacaggtgcccgccaccatgcccggccaattttttttgtatttttagtagagacggggtttcatcatgttagccaggatggtctcgatctcctgaccgcgtgatccacccacctcggcctcccaaagtgctgggattacaggtgttagccaccatgcccagcttataaatactattttaagggaaaaatttaatggataggttgaaaagcataaaggtcattgttacagaatatattagcaaatcaatataaatcaaggccaaagaaatatatatattaaatatatataaaggcagtataaatatatataaaggcagtataaatggaaaaacagataaagagtaagaaacacacagacgttttatgtcagtttaatagaaggaaaaaaggaaaaggtaacaaggcaatatttgaagagatgactactaagaatttcctatcactgaaaaaaaaaagatgtaagtcctcagattgaaaaatactaccaggagcaaggcataaggggaataaaggtaaccatatctgaatttatcacagtaaaaatttagcctattagaggaaaacatttttctctaatggaaaggaacaagaatcatctatcaaaaagaaaacagttaagaatatcttcatggccttgtggcaggcaaagatatattaaaaaagacaacaatgtacagctgtccctctgtaccaggtgggaggggtgaggacagttgaggtttggtttcaggaccatggcagacacaatctgcggatgctcaagtcccttatataaaatggcacagtaagttggtttcaaccaactgtgagtctcaacctactaatacagagggccaactatacgtattttacatccatgattggttgagtctgtggatgcagaatccacaaatacgaagggctgactatacatatgtgatgattccattcatgtaagattcaaatataggctaaggaagaatttcttaactgagtccctacgagtgtgaagcataaaagaaaagatggatacatttgactacagtaatcattaagaacttctgctcacagaaaagaaaaccgtaaacagagctaaattcaattcagagtagaaaaagatacttgtagtttgtagaacatgcaaagtcccataagcagaacatataaagaactcttacacattaagaaaaatacagacaattcggccaggcgcagtggctcatgcctataatcccagcactttgccgaggcaggtggatcacaaggtcaggagatcgagaccatcctggctaacacggtgaaaccccatctctactaaaaatacaaaaaaattagccgggcgaggtggcaggtgcctgtagtcccagctatttgggaggctgaggtaggagaatggtgtgaacccgggaggtggagcttgcagtgagccgagatggcgccgctgcactccaccctgggtgacagagcgagactccgtcaaaaaaaaaaaaaaagaaagaaaaatacagacaattcaacagaaaaa[137 bp omitted]cagtgaaaccccatctctactaaaaatataaaaaattagatgggcatagtggtgggtgcccataatcccagctacacaggaggctgaggcagaagaaccacttgaacctgagaggcagaggttgaagtgagcgaagatcgcaccgctgcactccagcctgggcaacaatgtgaggctctgtctcaaaaaaaaaaaaaaaaaaagaatttcaaaaaaccaatgacttgaaaatgtgtgctaaaactcatcaggaaagaaaaatgtggccgggcacggtggctcaagactataatcccagcactttgggaggcgggtgggtcatttgaggtcagcagttgaagaccagcctggccaacatggtgaaaccccatctctacaaaaaatataaaaattagctgggcttggtggcacgtgcttgtaattccaggtacttgggaggctgaggtgggagaattgcttgaacctggaaggcagaggttgcagtgagctgagatcatgccactgcactccagcctgggtgacagagcgagactccatctcaaaaaaaaaaaaaaaaaaaaaaaaaaaaaaaaaagaaaaaaagaaggaaatgcaaattaaaaccacactgaat[137 bp omitted]cagggagaaaccccatctctactaaaaatacaaaattagccgggcgtggtggcgcatgcctgtaatcccagctacttcggaggctgaggcagaagaatcacttgaacccgggaggcagaggttgcggtgagccgagatcgtgtcattgcactccagcctgggcaacaagagtgaaactctgcctcaaaaaaaaaaaaaaaaaaaattaaagtttgacaataccgtacattaggaagcatgtgcaacaatgggaacattcatatactgctggtgaaattgtaaacaaatacaagtgttgaagaaaagttaaaattaggtagctcggctgggtgaagtggcttgctcctgtaatcccaacactttgggaggttgaggtgggaggatcacttgaggccaggagttagagatcagcctggtcaacatggcaaaaccctgtctctactaaaaatacaaaaattagctgggtgtggtgctgcatgcctgtaattctcacaattcgggaggctaaggcatgagaatcacttgaatcttggaggcagaagttgcagtgaacccagatcacgccatttcactccagcctgggcgacaggactagactctgtctcaaaaaaactaaaaaattaggcagctagtttgggagcagtagctcatgcctgtaatctcagcccttctggagcctgagtggtgggatcacttgagcccaggagttccagaccagcctgggcaacgtggcaaaaccccgtctctacaaaaaatacaaaaaattaaccaggtgtggtggcatgcatctgtagtcccatctactcaggaggctgaggtggggggatcacgtgagcccaggaagtggtcaagactgcagtgagccgtgatagtgccactgccctccagcctgggcaagagtgggaccctgtttcaaaaaaaaaagtaaaagcaccctctgggaaccaatagacaggtaaatgttattattttgcaaagtccataaaaactgaaaaaatcaacacagtaatagattaaaagtatgaaatatagaaatgaacaaggtaattatcatgctatggtgaaaatgtacactcttacaagtattcaatataatgacaataaagcagtccagtatacaaagaaatcactgtaaaatttatataactttgcattaaggttatataagggagaaagtatcagtattttttagaattacatgagattatgcaagggtgaaatgacatgaagtcctggatttacttgaaattatttgtggtgggacgcggtggcttacgcctgcaatcccagaatttgggaggccaaggcaagtggatcacctgaggtcaggagttcgagaccagcctggccaacctggtgaaaccccatctctatgaaaaatacaaaaaaatttgccaggcatggtggcgggtgcctgtaatcccacctactcgggaggctgaggcaggagaattgcttgaacccgggaggtggaggttgcagtgagccgagatcacgcctttacactccagcctgggtaacaagagcgaaactccatctcgaaaacaaagaaaaaaaagaaaatatttgtgcgacaataggggtagattagtggcatgtatttttgaaaattttcacaatgaaaagcaacattctacgacttgtaaaataaatgagcgaaaacatttatttaaaataaaaattaaccattcttaaagagtacaatgaaatgaatactaccaaacactgtgagtgtctgaaagcttcagaaatatcttgtctctgagaatctatcctaagcaaatacagaaaaatctatatgcgtaaagtgtgcttttacataaagaatgcatatatgcataaagaatggtacttttacaaacaagcattgattagaaagcagcttaactatgtaagtataagtactcgaactgcactaaaagaaaaaaaaaacagaattatatgagaaaatgcatgtagaaactattacatacctatctaatcttcatggccagatctttttggtacttttcttcctgagttcctgagttcaccttctatcctgctgttgttcaacctacatttccttgccataccttctcctgctgtaaacctctaggtatcagggtgcttcaggtttctgtccttgctatatttattccctaggggatttcatccagtcacaagactctatatctctacattgaaggctctccaaattttcctccaatgctgatctgacctcccagttccagacttctatactgagctgcctgcatggcatctatgctgcgtccagtaagccctgaagcttaacataagcaaacccacccttgattttgcaagccccaaatctactttccccatttcagtaattacaaagcccattcttccacaggctctccctaaaaagcatgaatccttttttttccgcttacactccaagactgaatcctgctaactcttccttgaaaagatttcaaacccaccgcttccttccactgccactgataacatttcaatggtctctgagccatcactgtatctcaaccagactactacaaaaacctgctaaacagccactctgcttccaatcttgccacctacaaagcagccagggaaatctttttaaaatatatgttgcatcaaggacaggcgcagtggctcacacctgttatcccagcacgttgggaggccgaggtgggaggatcacctgaggtcaggatttcgagaccagcctggccaacatggtgaaacactgtctctactaaaatacaaaaattagctgggcatggtggcgggtgcctgtaatcccagctactcgggaggatgaggcacgagaatcgcttgaacccaggaggtggagcttgcagtgagccaagatcatgccactgcactccagcctgg[137 bp omitted]tggtgaaaccctgtctctactgaaaaaaaaatacaaaaaaattagccgggcatggtggcacgcacctgtaatcccaactactcgggaggctgaggcaggagaatcgcttgaacctgggaagcggaggttgcagtgagccgagatcatgccactgcactccagcttgggcgacagagcgagactctgtctcaaaaaaaaaaaaaaaaaaataatgagttgcatcaagccatttctaggtgcacagccttctgatgacttcttgtcttagaatgaaaagatttcccatggcctgtatggcagacagtacataaactgacccactctttcccactcctgcctctttgatctcatctcccacccacgtacccctctgctctcactcctccagtcactggcctctggggctgctcctcaaacacagccaacgcacagctgcctcaggcccttgaaggtctgcattcctccatctggagtggtcctccgcccagtacagtaacttactatggtgcttcttcaggtctctgcccaaacgttaccatatcatttagtaagatatggtaaatttctcttgccccttcacataaaatatcatcctttatccccttcctctacttcttatttcttttagtatttactattacctggtatgttatatattcatctattttcatgtctctccctacactgtggggtaggttctgggaacagagattatgcatgttcttttttttctttttttgagagagtctctctctgtcactcaggctggagtgcagtggcgtaatcttggctcactgcaacctccacctcctgggtacaagtgattctcctgcctcagcctcctgagtagctgggattacaggcgcatgctaccacacccagctgatttttgtattttttagtagagatggggtttcatcatgttggccaggctggtcttgaactcctgatctcaggcaatcctcctgcttcagcctcccaaagtgctgggattacaggggtgagccactgcacccaatcacgcatgttctattcattactgtaacctcagtgttgagaatagtgctgggcataccatagtcactacagagacataaactaaatgaatgaatgtgctgttctgttcctcctccttcataccaaatctctctttgccagctcttaccttctccatggagacacaggccctttatttccaaccctctatataaagtcaatgatgcttacaccaaaaatctccccctatgacttctatgtggatcaacccctcttctacctcgttagccctcactttctgctaagctccctattttaacttcgcttatggtggtgttatttgtagacatgttctagtacttctactaggcagtaagttctgaaattgcttattccttttttaaactctgcagcacctagctgagtgccttatacatgttagaaaatcagtaaatgttggtaaaaaatatgaatgaatcaatgagggcataaacccctatcccaaaaaacttagtaaaagcaaataagtctttggcagtgtaggaaaaaatctatttctggagacagtgatgcttttattagactaaatacaaaggaggatgagaagctaggaaggaaatggatccaaaatatggatagaaaagaatatcactagaaagggtggaggagggcaccagctggttagaactgagagagaaggataagaggagaaaagcaggcaaagtgtgttaggtaaaggggaaaggtaggatcatttgaaagctcatgtagaaaaggtcttacatttgcacaacaggccaaaagcctgtgaggagagtttcccagatagcatctaaaagatgcagtctctctaccagccaaatcacgcattacctgctgtgcctcacttacctggccactggcctcttgttagctctctgtcagccaaccagggctccttcccttgctccaagtaggagatcacatttggtttagaaatagaatgccctgcttacaaaagaagtaacaaaacaaatttatcatgagcatatcctagaattcaaatccagtcccttcattataaagaaagacatggcattatgagaagagtcaaagagaggtacaacggacttatgaaacataacggaagatgtaaaacatccccaaaaactcaatgcagcttcctttttctaactctaccatattcagaacattcctgtggaacaggatatcaaaattcgactggtttttgaaagccaggtgagcatttcacattggaggaagtaggccttccaagggcagaatctaaattactatggacagatgtccttacccattgaaaccaggttgctgtaattctccaacatcacatctctgtataaatctctctgatcatcattcaggcattcccactcctcctgagagaagtctacggacacatcactgaacatcactgactcctggaacaataaccacgtatatgacttcattaattttttaaaaagtacttttgtgaaggaaagagagaagaaaaagattaaggtagaggaagtaaaatatagtgagcatatgaatgtctgggaagcagtggaggactgtaaacaaataagcacaactgaatcactgggtttccaggtcattctgtttcctccaaatgaaactgcctgagtatgctaggatacctccattatccaaacaaggttgggaaggtacaaaaattcagctaagagggcttttccaattaaatgaaattgtatatgcaatgcctcacactatacctgtcatataataaatcaacgatacatgtgatctttctccctctcttttcccaaatagctgagagtcaaatttcagaataagggataaagacattaaaagccaccagagagaagagcaggtcatataaaaggcatcaaaaattagaggggcaatggaattctcaagaacacctctaaaagcaagaaacaataagaacgattcttcaatattctgatggagaaaataaactctgacctagactttcataaacaaactatcattctgttttgagtgttgagaaaagacatttgtagacatccaaggactcaagaagagtttcttcagaaacttctagaggatgtggtccacaaaaacgagggagtaaacaaaaaaagaagacaacataggattcaggaagtaggtaaagtttcaggaaagctgtgactgagagagtaaaccagaccagatgggaacaaggaaacaggaaatggggaatcaagtctctatatcaaaaggaactgatgtgtctgaccagagggaaaacgtattgattggcctgtggcaatgatgctggagattctggatataaacacacaaatgactaggcaaatgaggggggaagcaattaaccccaggaaaatgaagggttgtatagaacaaagccatgagctcgcttggcagagaataatatttgcagccgtaataaggtgtatactattgatttaaccaaaaatggtgatatggtaacagtcaggaaaaacgaaagtgcagtatgggaatacaatgttccctttaactttgcaatcagtcaagagataatgactaaagtgggtttatcgaaaaatggtagtaaaccaattttcaagagttgagggcagtggcctcttggagtgggtctggtaacgggacaaaaccagaattgaactatttcccttgtagacatgtgtaaaattacttttaaaaactttgtatcttagaaaattaaatttgcatataatttaagactctgatccattcctatgccagactattatataataagaaatattccttgttacaacaaatgctattcatatgtttctcactgaatactattctattataaggctataaatgacatctatccttttgcctttagaaattcaggctagaggtgatctctaaagacctcgccaacattggcccaatcttatttataaccacctactgcccagctgtaaattccccttataactaagctacagaaaactggtgaaggatgatccagtttcaccgttggtattactgacatcattgcttttgttttttaaacaggatcttcctctatcacccaggccaaagtgcagtggcatgatcacatctcactgcagccatgacttcctgggctcaagtgatcctcccacctcagcctcccgagtagctgggactacaggcgtgcaccaacatgcctggctaatttttgtattttttgtagagatggggtttgccatgttgcccaggctagtcacctgggttcaagcaaaccaccagcctcaacctcccaaaatgctggaattacaggtgtgagtcaccacgtttggccactgacatcaatttttcatggatgcttagtgaggtgtgagagctttgtaacaaccactagtcacactctcaaacataaaaggctcgttaaccaggagaccttgccatgtactaggactgaaatcaaacaaaaccacagcatgtattttcttattggaaaacccaggtctacagagctaatgagggcttttccctataaggtgcccctaattacttattttcatcccatcaaatcactgtccaagcaaattaaattcatattaattcaatgtggggaacacatttctgccctatcaggatttttggtagaaatctgagataggagatgctgaaggacttgtaaaccagcatgtaaacattgtttaaaagcggggggcggcggggaactgaagaggagactggggttgtttaggaggaaatgcatgtccttttcctgacaggggaccctggaaaccagtgtaaaaaaaattattccaaacctgatctgggtcaggtttttacattacataatttttacattacataattcttaaatctctttatggaaagaaagaaataagtattcttgatgaaactgataggggattttctgatggacattaatctaaattaaaacttcttcagagaaatttgttattcaaccacttggctgactaacagttaacagtgaattaatataaatttttttctgggcacagtggctcatgcttataatcccagctctttgggaggctgaggcgggtggataacttgaggtcaggaattcgaggccagcctggacaacatggcaaaaactcatctctactaaaaatacaaaaattagctgggtgtggttgtgggcgcctgtaatcccagctactcaggaggctgaagtaggagaatcacttgaaccctggaggcagaggttgcagtaagccaagattgtgccactgtactccagcctagaagacagagcgagactccatctcgaaaaaaaaaaaaaaagggtaaattttctaacaatgattatgtaatcaattctttttttttctatgaattggcctgttagagatcctttcctttacagcaaaattctgacattgctcataaccaaactttttgaaaggtgttgtttttctaacatcaaaaagcatcatcatgaggaaagcaaatgtttacagttactagaagtaaaaatcactctatctgagcaaaaggaaacagtatctcacctgagccatggctctgatatttgtagaaaaggaccttctcttggctcttcttttggagaagggtagagctgggagaggcaaaagaagatagataagaccccactttcctcacagctcctggcccagaatgatcattttccttctgttcatgcttcagaaatgcttgtggggtatcagtgaggagaatgggcaaatgtctctatcatccctagcttcaaagataccaggctgtaactggagcaggatggattagggcaactcaatatggcttggagaatatatgtttatatacacacacatacatacatatagatttttttaactcatattatacacactacttatacacgttgctatttttactttacatatcttggaatgaagtcccaattagcacatattgtgttacataactggtttaatagctacattgcagtccattaaatggatataacttaattttttttttcttttctttttgagacagagtctcactctgtcccccaggctggagtgcagtggtgcaatcttggctcactgcaacctccgcgtcctgggttcaagcgattcttctgcctcagcctcccaagtagctgggactacaggcatgtgccaccacgcccggctaattttttgtatttttagtagtgatggggtttcactctgttagccaggatggtctcgatctcctgacctcatgatccgcccgactccacctcccaatgtgctaagattacaggtatgagccaccgcgcctggccataactttatttatttaaccaatctgtggccaatcatcatttaggctttttctagtttttcactgtaacaaacaatgctgtaataaatatccttgtgcatatgtcattttacctgtatatgagttcttcacaattaattcctaaaagtataattgctcagagattatacacattttaagtttggatatacctgggtcaaaccagttttctgtttctgttttttttttgtttgtttgtttgtttttttgagacggagtcttgctctgtcgcccaggctggagtgcaatggcgcgatcttggctcactgcaagctccgcctcccaggttcacgccattctcctgcctcagcctcctaagtagctgggactacaggctcccgccaccacgcccgcctaatttttgtatttttagtagagacgggtttcaccatgttggccaggctggtctcaaaatcctgaccttccaaagtgctgggattataagcgtgagacaccacacccagccttgtgtgtattctttataaacatcttcactttaagatgtttaaagtgcccaaaagaataagttatactaaaatactaaaggaagactacattgtttaaggggaagaactgaattagtgatcaatgtttaaatgtttaagaaaattttggtgttttgcttattagctacaagaacttaataaacttaaaattatacaaactataaagagcactattattctctatgcaccaagcttcttgatcattaaacaattcatcaattatttcatataaaactgaccacccagaaagtagcaccatgttatcaattatctaatggcttcctctacccataggcactcactcactgcatttccccagatgaataccaaaggaatacaagtgtctcttctttaaaacctaaatgcacgctgatattattattattactactacatattaagctcttagtattcttttatcaaccaaatagcctatgatatataatagccaggcattgtgctagatactaaagagtcaaaaataatccagaaagatctggaaacagagttccttcttctatattcctcattttaagccctcctttctggtctctcctcctggccttcctctggttaaagggatgtcttcaaatgctgtaccttccaagcaggatggcatgaaacattcccacttcaacagctccataccatgcttgttgcattctcaacactcctcatctttgccccagagggcagcctcccatgctgaattcttacatcaggggatctgctcctctcttttaaattcagccctcattaatgtaaaaaaaaaaaaaaaaaagtctcacgaaataagaaagaaaactttctcaacttgatgagtagcatctaagaaatacctactgttgggagagacagttaccatgggtctccacattcttaggcgtcttgctgggtatgcctagaatgcaagattctaactactcatttcccagggttatttatgcagctgataaccttgagagttgagataagagcacgaacagtagggttgcttactgctgactataaaagcaatggattatccaggctcagtgttcctcagtggctatgcccatgcactgcatgaatagcatccatgtagacccacatgctgtccccatgggagctgagagaaataggaactgatgaacactgatgcctacgctgcttgctgtgccatgagtaataaagtctttgtctctgatccaggggtctcatgttttctgccagcattcatgaaactaacaggctaatgtatgagcttgtatgtaggaaaatatcaaatcctagagctaatgttataactaatgttgaaacactgaaaaatgtccccctgaatccaggaaaaaaagaataatgtgcattatcatcatttctttttaacaatgtaataaagggcttggccagtataatagggcacgatgaagaaataaaaggtataaagattggtaggaaagaaagaaaactatcattattcacagatgataagttgcagacatagaaaatcctaaataataaattcttaaaattagcaagtgaattaaacaacatggtctcatatagagacaatatataaaaatcaattgcatttctagtaacaagtaattggaaaattgtttaaaatgtaaatactattcacagtttccataataaacatcaaatactcaggtataaagctatcaaaaatgttactaaaaatgacaaattggtaagagaaattaaggatcttaacaaatgtcgacatataccatatgtactatagattgaatattgatgtcaattctcccaaaatgaacacagtttttgtttttgtttttgaatcagggtcttgctttgttacccaggtcggagtgccgtggcacgatcaaagctcgctgtagcctcaacctgtggggctcaagggattctcccaccccagcctcctgagaagcgaggagtagaagcacgccatcaagtccagctaaatgtttggggttttgtttctttgtttgtttgcgtgtttgcttggttttagttgtttttttgtttttgtttttgttttggtagagacagggtctcactgtgttgcccaggcttgtcttaaactcttgggctcaagcaatcctccagccttggactcccaaagtgctgggattacaggtgtgagccactgcatcaggccccaaaatgaacacatatatttgtaaagaaaaccccagcaaggctttggggggaataaggtaaaaattagcaagttgattctaacatttatttggaaattagaagagcttataatagccgagatagcttggaaaagaaaaaaagtaggaggactaaaactacagatttcaagacagcagtacagacaaaacaataaaaccaaatagaatatagagtccagaaagagagccacataaccacatgtatatactgtcacctgatttatgacaaagactccatgcaatttttttttcttttttttttttttgagacagagtctcactctgtcacgcaggctggagtgcagtggcaagatcttggtttactgtaacctctgcctcccaggttcaagcaattctcctgcctcagcctctggagtagctgggattacaggtggctgccaccacacccggctaatttttgtatttttagtggagacagggtttcaccatg[137 bp omitted]acagtgctgaaacaactaggcacccaactggaaaaaaaaaaattaacctttaccccatacataagaattaatttaagagggatcacagacttaagtgtgaatgtgaatgtttaaaagcttcggggccaggcgtggtggcttatgcctgtaatcccagcactttgggaggccaaggcccaccaaggcaggcggaacacctgaggtcaggagttcgagaccagcctggccaacatgttgaaatgctgtctctactaaaaatacaaaaaaaattagccgggcatggtggcagacgcctgtaatcccagctactcaggaggctgaggcaggaaaatcgcttgaacccaggagacagaggttgcagtaagctgagatcacaccactgaactccggcctgggcaacaagagtgagacttcgtttcaaaaaaaagcactagtcataaaagacaaagtactaaataaatatctgctacaaaaatggggaaagacataaacaggcaatcttttaaaagactctgaaatgttcaaacacactcataatgagagaaataagaaaacaacaatgagggctgggcacaggggctcatacctgtaatctcagcactttgggaggccgagtctggtggatcacctgaggtcaggaatttgggaccagcctggccaacatggtggaaccccatctctaccaaaaatacaaaaattagctgggcgtggcggcacgcgcctgtagtcccagctactcaggaggctgaggcaggagaatcacttgaacccaggaggcggaggttgcagtgagccgagatcgcgccactgcactccagccccggcaacagagcaagacactgtctcgggaaaaaaaaaaaaaaaaaaaaaagaaaagaacactgaggtactatttctcatctattagactggtgaaaactaaaaaacatgacaacatattctgttaggtgggctgtgaagggaaacagacatgctcatacacagcaagtaggaataaaaactggtacaacagttctagagaggaattttgcaatacttaacaaaactacaaagcacttaccttttgacccagcaataccgcttctaggaatctaccctaaagatactcctccagcaatagaaaaatacatatatacaaggttattgcagcactgtttctagtaacaaaatattgtaaatgacctaaatatccatacgtaggaaagcggttcaataaactatgataaatccacaggctgcagtattatgtaacaattagaaaagaattatgaatatctctttaactgcctgagtgttatccagaatgtatcattaagagaaagaaacaatgtacaaaagagtgcctagagaatgctatctttaatgtaaaaagaatataggtaactcttcatttgtgcaaaagaaacacagcaaggataaagcagaaacgaatgaagttgaatatatacaaggagtctgtgggaactaagttaatttttatttatttatttatttattttgagacggagtctcgctctgtcgcccaggctggagtgcagtggcgcgatctcggctcactgcaagctccgcctcccaggttcacgccattctcctgcctcagcctctccagtagctgggactacaggcgcccgccaccac[133 bp omitted]tcccctgcgaatgttttcacattcaaaatagtgtagcctgctacaatcaaccaggatgtgggggaacccaaaatgcaacaaatgatccttaaatgtaagaaaaatgtaagaaaaaaaaaaaacatactgaaaagagtggcaaagaaaagaactaaattgagtaactttggaagatgtttgtttactatatactataagcttaaagaaaaagagctacacagagattctctactgtagttactaaatactttttacacaggtccaggttggcaactctgaactaatttgcatgtattctaggatagagctaattattgattctgagaagcaggtttctctctgttggaaaatgaagtaacaaggaaatggccaaatttgatgggagacaattctccatgggtcttgcatgtttctgcgtatcttgcaagaagaggtactaagtgtttttgttctgcactattttaccaagttgtttatacagtgaacagccttggaagacagagtcggtctccttctacagcaaagggtaggcattctaactatccattataaaaaattcaggtttcctaaggtcaagggaacacacagatacctgtgtattttgcataatcctgggtgtatgactgaatcagtaccatgagaatgtagatattctgaagattgccatgagcaacaaagcatcctttgtctcagactcagaagtctcatgttttctgaacgtatctgtgaaactgacaagccaacttactagcttacaactagggtaaaatctcagatagttcatagttcttgggaaaagaaaataccctgtggtactggaatagaattaaacatatgagtgtaaactggtgtgtttttaacatataaacaaataaatagacataaatgtgcatgtagacatttgtgtattttctcactctctccactgaccagaaccagagcaaagacacaccagtagcaataagcacaccaagtgcccagatcttggtttataaattcattctccaataaaagaaattaatgctgcttggagaaattgctgagcccagagatggaagagggaaaatacaagatgaacctggaacatcttatgtcccagaaagcggggttggggggaagctttaaaaaatgatcacacgttgaaaagacacaagagccaacttaaggagcttctgatggccaaatatgggaaaatttgaacagcaaaataaataaataataataatagagaatagaataaaataaatatccatgagtccataggtaaataattgaataaacaaatggggacaaaagaaaaacttcagctgaattaaatgtaaaggagtttcattgaacaatgaacgattcgcaaatcaggcagcccccagaatcacggcagattcagagacactccagggatgcctcgtggtcagaacaaatttatagacaaaaaaaagggaagtgacatacaaaaatcagaagtgaggtggagaaacagctcaactggttacaagttcttgtttgccttttttttttgagacggagttttgctcttgttgcctaagctagagtgcaatggcacgatctcagctcactgcaattctcctgtgtcagcctcctgagtagctgggattacaggtgcactccaccacacctggctaattttttgtatttttagtagaaatggggtttcaccatgttggtcaggctggtctccaactcctgacctcaggtgatccgcctgcctcggcttcccaatgtgctgagattacaggcgccagcctctgtgcccagacagtgtttgccttacttaacacagtttgaacactcagcagtgtatgagtggttgaagtattgctgctgggattagccaagactcagcttgttacaggcacatacactgttacaggcacacaagttaggtttccaattctgtctacctgttaggttacagttcgtccataaggactcaaatatagaagtacaaagtccttctcaggccacatttagttcacttttaacaggagcaagaagagacagctcttccttatagtagaatttaaattatcaaagtgtaagaaatgatagaaggagaaaatcaccgctaggcaaacatcacagtaataattgttacaggtaaaaattatcaatgaatgttaaaactaatgcgtgagaaaacatgatgagaaataggattttggcatagtttcttttttttttttttttttttgagatggagtctcgctctgtcacccaggctggggtgcagtggcgcgatctcagctcactgcaaactccacctcccgggttaacgccattctcctgccagagcctcccgaatagctgggactacaggtgcccaccaccatgcccagctaattttttgtatttttagtagagatggggtttcaccgtgttagccaggatggtcttgatctcctgaccttgtgatccgcccacctcggcctcccaaagtgttgggattacaggcatgagccaccgcgcccagccatttttacatagtttcaaattatttccccacaagatacttattcaataaaatgggaaaaacagtgattttacagaggagaaatctggcaaacaacactgttaccaagttctcaaagttaacattgctaataatgagatatactaatatatatatctcctgatatgacacattgagaagagttcaacatcatttctgtgatcttcttgccaaaactgcccagtctaaatctaaccataaggaaacatcaggcaaacgcaaattgaaagatattctgcaggctgggtgtggcaatcccagcattttgggaggccaaaacaggaggatggcttgaaagcaggagttcaagaccagcctgggcaatatagcaagatgctatctctacaaaaaaaaaaaaaaaaagaaaatagccaggagtggtggtgtgcacctgtagtcccagctactcaggggctgaggtggaagaattgcttgagccctggaggttgaggctgcaatgagccatggtcatgccactgcatttgcactccagcctggatgacggagcaagaccttgtctattaaaaaaaaaaaaaaaaaaaaaaagtggccggtgctgggcgcggtagctcatgcctgtaatcccactactttgggaggtcaagtcggccagatcacctgaggtcaggagttcgagaccagcctggccaacatggtgaaaccccatctctactaaaaatacaaaaatcagccgggggtggtggcaggtgcgtgtaatcccagctactcgggaggctgaggcaggagaatcgcttgaacccaggaggcagaggctgcagtaagctgagatcgcaccattgcactc[144 bp omitted]gaaaccctgtctctgctaaaaatacaaaaattagctgggcgtggtggtgcgctcctatagtcccagctgctcgggaggctgaggcaagaatatcgctggaacccaggaggtggaggttgtggtgagccaagattgtgccattacactccagcctgggtgacagagactccgtctcaaagaataagacagagagagaaagagaaaagaaaagaaaaagatattttacaaaataactggccagtactcttcaaaagtgtcaaagtcctaaaagataaaaaggattaaagaacactcaaagatggaaggagactaatgaaacaatacaattcaatgcaggaccttggattggatcctgaaacagtaagaaaatttagcaaaatttgaaaaagggctctaacttaattaaaagtcttctatcagcataaatttcctggttttcatcattgcactgtgggcacctgcagagtatctgcaaattccttatactatgttcacaacatgaaaataaaattttaggccaggcatagtggctcacacctgtaatcccagcactttgggaggacaaggcagttggatcacctgagatcaggagtttgagaccagcctgaccaatattgtgaaaccctgtgtctactaaaaatacaaaattagctggccgtggtggcgcaagcctgtaatcctggctacatgggaggctgaggcaggaggattgcttgaacctgggaggtggaggttgcagtgagctgagatcatgccattgcactccagcctgggcagcaagagcgaaactctgtctcaaaaaaaaaaaaaaaaaatgaaagaaagaaagaaaagaacatttttaaaaaatttacgaaggggaaaatggacacaaaaaagaagatatacaaatggccagtaaacatacaaaaaggtgctgaacatcatttcacatcaaggaaatacaaattaaaactatgatgaggctgggtgcagtggctcacacttataatcccaggattttgggaggctgaggcgggcgggagtttcacatggtgaaactctgtctccactaaaaatacaaaaattagctgggtgtggtggcacgcacctgtaatcccagctactcgggaggctgaggcaggagaatggcgtgaacccgggaggcggagcttgcagtgagccgagattgcgccactgcactcccgcctgggccacagagcgagactccgtctcaaaaaaaaaaaaaaaaacaaaccaaaacaagacaaaacaaaccaaaacaaaaacctatgatgaaactgcaccacacaaccaataaaatagttaaaagactaaccataccaaattacggagaggatatgaagcaactggaactctcatacattgctggatggagtgtaaactggaacaaccacatgagagcttcgtagtatctattaaacattagcctaccctatgatctagcaatgccactcctaagtattaacccgggagaaaagccttcatgtgttcaccaaaaacacagcagagtgttcacagctgcagcatcatttgtaacagccccaaattggaagctacccaaatatccatcaacaatgtaatcgactaatatactacaatatatccccagtatagtgagagctaagtacaattacactgaacaacatgaatgaatttcacaaacataatatataacaaaagaagcctggcataaaacagtacatgctgcataattgcatatatacatgaagttcaagaatgtgtaagacagccagatgcactggctcatgcctgtaatcccagcactttgggaggccaaggtgggcggatcacctgaggtcaggactagctttgccaacatggggaaaccctgtctctactaaaaatacaaaaattagccgggtgtgatgggtgcctgtaatcccagctactcaggaggctgaggcaggagaatcgtttgaacccaggaggcggaggttgcagtgagccaagattgcatcactgcactccagcctgggtgacaagagcaagactctgtctcaaaaaaaaaaaaaaaaaaaaaaaaaagaatgggtaaaactagttaatgatagaattctgaatagattgtgtgggggagaaattactgagaagtggtatgagggaagcatctcaggtcctggcaaagttctttgtatagatctaagagtgttacacagctgtacacttaagatttgcacactttatataggctctatgtatctattgacagcctcctgctctgttgcccaggctgaagggcagtggtatgatcatggcttcctgcagctgcaaagcactgggctcaagcgatcctctcatctcaacctcctgagtagctaggacttataggtgccagccaccatgcccggctaattttttatgtatgtatgtatttatggtagagttagggtctcactatgttgcccaggctggtctccagctcctggcctcaagtgatcctctcaccttggcctggcaaagtgctgggattacacgcatgagcctccacacttggcctacaaaaatttttttaactcttggaactatgctttggtagggatatggagcaataagatatttcaaacattgctgttcaagtacaaatttgtgcagccactcgggtatatattttgacactgtttagtaaagtggaagatatatgaaccggcaattctgctggtaaataaactcaagcatgtgtaccccatgtgaaagaatgtggctgtgttgtttataaaatgaaaagctataaataactaatagggcatcattactagaaaggatgaataattgtggtatacttcagaagggagaatatagcaaagaaattgaattaaccgcgattttatctaatagggatgattcacagaattgtaaaaataaaccaaagacagtatgacaacattcatataaagttttaaaacggggaaaaactggagtataatgcctagagaagtatacgtaagtgataaaacctcacactgtgtgacttaccctgccacacaaacctgatcacactcccaccatggggacattcagctacagacaatccacgcccaaagcaacagggtcgcacacgcagggcctctatcggtcacataagcacaagtgcacgcttaccgaggaggcagtcacagtcacaaccacattgtcacagtcggcgcacacctgtaccgggtcacagtcacgatcacacattaaccacagccacacacacagatagaaacatgcagttactcgcaggtatccccacctgaactctgccgcacacagtcacacagcatatagtcgcacaccactacggggacaaacgcagtaacactcaaccaggcacaagctccccacagccgcacacacaatgccgcacgtggtcctgctccctctcacacacacaccagcagccacagtctccgaggccgtgctgcacacggtgtgagcgttggaaacacactcatcacaagggcagcctgtcacaatcgcgcgatcattcaccacacacctccacacagacgcaagcgcacgctttcaatctcacctccaccgccgcacaaagccgaggcttggcccccggccccgccctctcccgggtttctcacctcaggccttaccagctttcgaagcagcagaaccctccccggcactggggtagttgctggtaaagccctgagggtcccgccagcgcgtgagttggaagctgaattaccgcgagaagtacagtcttgccgaggagacctctgggaagcgtagtcagagacgtatcaaggccggacaagatggttcccgatcgtcagaattcctgtccgcgccttgcgtcagccccgccgaaaggatcgccccccctagtcaaaccgctcgcgccccagaggcctcatggagtcccgcctcaggctcgggccttggcccccaaagaaagccactccgacgtgtttgagatgggcttagttcccggacccgtcctactgcccccaggcgctggacagcctcagaaagaggacaagtctgcatggaaagataatcgcacaactgagccttctgggagatgtagttcggagctgggaaggcggttggaccctccgaaagtcatcttaattgctctcacagataagccggtgctgggctgccggcctgagtactgtgcgcccagagtgcgcaggcgcaaacatcctgggttgctgttttggcctctttgttcgggcgtgaattttgtttattgctccttagtgcagaggggttatgggaccagaggttgtgagactcagaagtggttggggacgcagaaggggtgtagaccaggaacctgcgacctgatggggggaggtcgaagggaaaggaatcgccaaacgtgggacaggtttggagaggcagaaagagaggagtctgaaattgcaaagggcaggtgttattctgacttctgtgtgctttgtgataaatgagtggggcaggaagtaagaggagtttcactttctccttctgcaattatttgtgtacttggactaagtgtatctcatggccagtatttgactgcttttgacctataaaggtattgtatacacagtcatgcatagtttaataataaggatatatgctctccccacggtctccctctccctctctttccacggtctccctctgatgccgagccaaagctggactgtactgctgccctctcggctcactgcaacctccctgcctgattctcctgcctcagcctgccgagtgcctgcgattgcaggcgcgcgccgccacgcctgactggttttcgtatttttttggtctccaccaaacacagggtttcgctgtgttggccgggctggtctccagctcctaaccgcgagtggtccgccagcctcggcctcccgaggtgccgggattgcagacggagtcttgttcactcagtgctcaatggtgcccaggctggagtgcagtggcgtgatctcggctcgctacaacctcctcccagccgcctgctttggccccccaaagagccgagattgcagcctctgccccgccgccaccccatctgggaagtgaggagcttctctgcctggccgcccatcgtctgggatgtgaggagcccctctgcctggctgcccagtctggaaagtgaggagcgtctctgccaggccgcccatcgtctgggatgtggggagcgcctctgccccgccgccccgtctgggatgtgaggaacgcctctgcctggccgcgaccccgtctgggaggtgaggagcgtctctgcccggccgccccgtctgagaagtgagaccctctgcctggcaaccgccccgtctgagaagtgaggagcccctccgcccggcagccgccccgtctgagaagtgaggagcccctccgtccggcagccaccccgtctgggaagtgaggagcgtctccgcccggcagccaccccatccgggagggaggtgggggtcacccccgccaggccagccgccccgtccgggagggaggtgggggggtcagccccccgcccggccagccgccccgttcgggagggaggtgggggggtcagtcccccgcccggccagccgccccgtccgggaggcgaggggcgcctctgcctggccacccctactgggaattgaggagcccctctgcccggccagccgccccgtccgggagggaggtgggggggggtcagccccccgcccggccagcctctccgtccgggaggtgaggggcgcctctgcccggccgcccctactgggaagtgaggagcccctctgcctggccacgaccccatctgggaggtgtacccaacagctcattgagaacgggccatgatgacaatggcggtgttgtggaatagaaaggcgggaaaggtggggaaaagattgagaaatcggatggttgccgtgtctgtgtagaaagacgtagatatgggagtcttttcattttgttctgtactaagaaaaattcttctgccttgggatcctgttgatctgtgaccttacccccaaccctgtgctctctgaaacatgtgctgtgtccactcagggttaaatggattaagggcggtgcaagatgtgctttgttaaacagatgcttgaaggcagcatgctcgttaagagtcatcaccactccctaatcttaagtacccagggacacaaacactgccgaaggccgcagggtcctctgcctaggaaaaccagagacctttgttcacttgtttatctgctgacattccctccactatcgtcctatgaccctgccaaatccccctctgcaagaaacacccaagaatgatcaattaaaaaaaaataaataaataaataataaggatatattctggccgggtgcggtggttcacgcctgaaatcccagcactttgggaggctgaggggtttgagaccagcctgggcaacatggtgtaaaccccgtctatactaaaaatgcaaaaattagccgggcatggtggtgcgcgcctgtagtcccagctactcgggaggctgaggcaggagaatcgcttgaacccaggaggcagaggttgcagtgagccaagattgcaccactgcactccagcctgggcgacagagtgagactcggtctcaaaaaaaaaaaggatacattctgagaaatgcattgttgggcaatttcatcattatggagtgtactgacacaaacctagatggtatagctgactgaacacttaggctacatggtataacctgttgctcctaaactacaaagctatacagtatgttactgtactgaatacagttggaacactgtagggaccagccctacaaggtctgtgggtttttctccctgtgtgcagagactagaggtggtagaaataaagacacaagacaaagagataaaagacacctgggcccgggtgagccactaccaccaagacacagagactgatagtggccccgaatgccaggctgcactgttatttattggatacaagacaaggggggcagggtaaggagtgtgagccatctccaatgataggtaaggtcacgtgggtcacgtgtccactggacagggggcccttccctgtttggcagctgaagcggagagagagagaagacagcttacgcattatttctgcatatcagagacttttagtactttcactaattttgttactgctatctagaaggcagggccaggtgtacaggatggaacatgaaagcggaccagtagtgtgaccactgaagcacagcatcacaggaagacggttagacctccagataactgcgggcgggcctgactcatgtcaggccctccacaagacatggtggagtagagtcttctctaaactcccccggggaaagggagactccctttgctggtctgctaagtagtgggtgcttttccttggcactgacgctactgctagaccacaatccgcttggtaacaggcgtcttcccagacgctaacgttccgctagaccaaggagccctctggtggccctgtccgggcataacagaggctcacacacttgtcttctggtcacttctcaccatgtcccttcagctcatacctctgtatggcctggtttttcctaggttatgattgtagagtgaagattattataatatttgaataaagagtaattactacaaactaatgattagtgatacttgtgtataatcatatctgtgatctgtatctagtgtaattcttgttattttatatattttattatactgaaacagcccatgccctcggtctcttgcctcggcacctgggtggcttgctgcccacagaacacaatggtaagtatttatgtatctaaacatatctaaacacacaaaaggtacagtaaaaaaaacagcatgaaaagtaaaaaatggtacacttgtatagggtacttaccaagaatggaggctgcaggactggaagttgctctggagagtcgatgagaggtgagtgaatgtgaaggctaggacattacagtacaacactctagactttataaacattgtacacttaagcaacactacatgtatttaaagtttttcttccataataaattaacccttgcttgctgtaacttttctactttataaatgttcaaatttttaaaagctttttgacttttctgtaatatcgcttagcttaaaacacaaatacattgcacagcccatgtgggatccgtatctcttggtaaggaaatgttgcaggtcagatgtcattcttatgtggccacatagaggtagaaagactgcatatatgatactgcctttcccaaccacgggctcgtattctaacataccgcaacaatgcccaatatttatggggtcatagaaaataggattcactatggttggagaatttccagagccaatttaagttcaggaatgctggcaatgagaatgatcagtaggaatcagtgtaatgatttacatagttgaaactatcaactgggccaggctggtggctcacgcctataatcccagcactttgtgaggctgaggtgggctgatcacctgaggtcaggagtttgagactagcctgggcaacatggtgaaaccccgtctctactaaaaatacaaaaattagctaggcatggtggcacacacctgtgataccagctactcgggaggccaaggcaggagaactgcttgaacttgggaggcagaggttgcagccagccaagatcatgccactgcattcaagcttgggtgacagagcaaagactccatctcaaaaaaaaagttaaaatagaataaaacatatagccattatttttctgtttggggcaattttaaagtttttcttttgtcacaaaaacaggaatgtactatgcaaaggcttgaaataggccatcttttttttttttttttttgagttggagtttcgctcttgttgcccaggcaggctggagtgcaatggcatgatctcggctcaccacaacctccatctcctgggttcaagcaattctcctgcctcagcctcccaagtagctgggattacaggcatgcactaccacgcgtggctaattttgggtttctagtagagacgggatttctccatgttggtcaggctggtctcgaactcccgatctcaggtgatctgcctgcctcggtctgtcaaagtgctgggattacaggcatgagccactgtgcctggaaaataggccatctttttaaacaaaaaggcaatgattcacaaaagtctatgaatagaacatgtaactagttgatacaaatctaataggatttgtttaaaatcagtcaaatctaatacatctgaagtgttcttgtataaagtatcacatgaagaaaagaagaatttattaatgtcttaaaaaaatgggtttcttcatagacaatatgacaacttaccattaaaagtgtttcgggacggccgggtgcagtggcttacgcctgtaatcccagcactttgggaggccgaggcgggtggatcacgaggtcaggagatcgagaccatcctggctaacacagtgaaaccccatctctactaaaaatacaaaaaattagccgggcatggtggcgggtgcctgtagtcccagctactcgggaggctgaggcaggagaatggcgtgaacctgggaggcagggcctgcagtgagccgagatcgtgccactgcactccagcccgggcgacagagcaagactccatctcaaaaaaaaaaaaaaaaaaaaagtgtttcaggagacataaggaaatgcaacattattcttcctgaacacttttagttcaagactttccactcaataaaataggaaaggatctgaaactgagaaaatgtatttgagtacaaacagcttgtgaaacataatacttttttttgcatcatcagagggttttactgaacttataaccaacttgcccactcagtatgcaattcagatgtgagtgaggggccgggcgcagtggctcactcctgtaatcacagcactttggaaggcagaggcgggcgagtcacctgaggtcaggagttcgagaccagtctgaccaacatggtggaacctagtctctaccaaaaatacaaaaattagctgggcgtggtggtgtacacttgtaatcctaggtactccggaggctgaggcaggagaatcgcttgaacctgggaggcagagattgcagtgagtccagatctcgccattgcactccagcctgggtgacagagcaagactccatctcaaaacaaaacaaaacaaaaaaaacagatgtgagaggacagaggtgtctcacaggagcctgtactgtcttcaatcctatgtgtgcaggtatctaccacaggcaaacagtttctccacattttgtagttatatgatcttgctactagcaaaaagaggtaaacagcccctgtagaatgaagggactacagtcacgggactagagtcacagaatgaagctttcctcttaatattttttaatttgatgtttgaactctttttcttttttccttgagacagtcttgctctttcgcccaggctagagtgcagtggcacgatcttggcttactgccacctcctgtgttcaaacaattctcctgcctcagcctccggagtagctgggattacaggcgctcgccaccacacccagctaatttttgtatttttagtagagacggggtttcaccatgttggccaggctggtctcaaactccttacctcaggtgatccacccgcctcgggctcccaagtgctgggattacaggcatgagccactgcgcatggcccgatgtttgaactctcaatgcagcatcctagagaagggtgttcgggacctcctgtgcccaagggaccgataaagaaaaaagctccatttattatttgggatttgatgcacagatgaaaaacttaacacacaataacggaagtcggttgttagtaaatcacatcctagtctttcagcacttccataagagacgacatcttcagttgtctagttcttgtagttttagcacggcaacatcaatgatgcctatgtccagaatcagttaaaaagaccataatttgtttctcttagttcatctatttttcactggctcatggtcccaagtgtatctgaatgattacctttgggcattctctgctattgcttattagggtgctgtcgattgtccccatgttttgtgggctggttgggaaggggagcttgggaaggatgtgtcactctcaggaggttgtaagtcattgggacgcctccagggatgattccttccatggctgcaggaagtcctcctggagccacgcccacgatgcctggcggatatctgtatgttgcaccgttgagctcgggatgaattgcttgctggtctattgctgaccaaggcgctgatgtgacaaataactccttgttcacacagtttcttaagctttctgggacgcgacctgtgatgactcggcggatctcggtggcagctgcctccttcatctccagtgacgcctgcatgctgtcctaggcagtgtgaggagtgaagatgagatttggcgcatctttcaacggagtctgagcaaagctaaagggctccgattcgtgcaagccaagggctgcccctcctatcctgtcctccttgaggacctgtgctaaggctttctcatccaccaggccaccatgggctgcgttcacaaggaatgctccctgtctcatctgctttatagtaaagtcattgacgaggtggtggttatgttcattgagattgcagtgcaacgagacacagtcactctgatacagcaaaccctgcagggtgtatcagggtcccctctgcatgccctgggacctctctatcttgtcctacaagtaggggtcataaaatacgacgctgaatccaaaggccttggctcaaactgcaaccgcctgcctcatgcaaccgaagcccatgaggcctagcgtcttccacgaatgagggccactcccatggccacctcgagaatctgctccacgctctgaacccgcgcgccttcccacagtgtctggtacagccacatattcctccggcagagattgaggatgtggcagatagtggagttggctgcctcttccacggctgtggaggggatgttgcacatagtaatccggagctcactggcagccttgatgtccacgttgtcgtagccacttgcctatccacacgatcactctcagggccttgaacttctccaggtcctcccttgtttagaatcttctcgtggatctcctgcgtggactgtgcgtcacagaaggccacagtggccaggtccttcaggatgggcatctccacggtgcaggtcacagccatccagcggcgccagcagcgggagggggtgcagggggctgttcgtgatctgagggtggatagcttcacaagttctgtccaatcgctgtctcgtgattttgtgcttatccaccagggccattctttatggaactttgcaactctcagatcaaaaggcaaagcaggcctggcatggtgcctcatgcctgtaatcccagcacttgggaggctgaggcaggcagatcacttgaggtcaggagtttgagaccagcctggccaacatggggaaacaccatctttactaaaaatataaaaattagctgggcatggtggcgcgctcctgtaatcccagctactcgggaggctgaggcaggagaatcacttgaacccgggagtcagaggttgctgtgagctgagatcatgccactgcactccagcctgagtggcagagtgagactctgtctccaaaaaccaaaccaaaacaaacaacaacaacaaaacaaaaggcaaagcagtcctctaaaaacttacggaaactcgcaggagtgtgtgtgcatgacgccactatgaacccaatacatatctgtccacaaactctatagttcacaggatgggctgtccatcttttctttctttctttctttctttttgtcgccaggctggagtgcagtggcgcgatctcagctcactgcaatctccacctcccgggttcaaacgattgtcctgcctcagcctcctgagtagctgggattacaggtgcacaccaccacacctggctattttttgtattttagtagagacggggtttcaccatgttggacaggatggtctcgatcttctgaactcgtgatccacctgccttggcctcccaaagcgctgggattacaggtgtgagccactagctgtccatctttttaagggaatgcagcttcgtcagttcaaaaacatttaaggtgatgaaaccctcgtcctgggcagtcagcatccacagcggaaaggctcccgcccctcccaccccacctggaggctgtgctgcctcagttcagtgcagcatggctcctggttcagtccttcgctcctcgggccgctcccaagccaccttaaaatgacacactgaatttggattattattattatctttttttttttcagacagagtcttgcagttgtcgcccaggctggagtgcagtggcgcaatttcggctcactgcaacctccgcctcctgggttcaagcaattgtcctgcctcagcctcccaagtagctgggattacaggcacctgccaccacgcccagctaatttttgtatttttggtagagacggggtttcaccatgttggccaggctggtcttgaactcctgacctcaggtgatccaccctccttggcctcccaaagtgctaagattacaggtatgagccaccaaccctggtctaaacatttatttttttaatttcttttttctttttttttttcttttttgagacagagtctcactctgttgcccaggctggagtgcactggcacgatctcagcttactgcatcctctgcctcccgggttccagtaattctcctgcctcagcctccagagtagctgggactacaggtgcccgccaccatgcccagctaatttttgtacttttagtagagacaggctttcaccatattggccaggctgatctcgaactcctgaccttgtgatctgcctgcctcggcctcctaaagtgctgggattacaggcgtgagccactgtgcccggctattttttatttttttgagacggactctcggctcactgcaaacctctgcctcctgggttcaagcgattctcctgcctcagcctcctgactaactggattacaggcatgtgccaccatgcctggttaatttttgtatttttagtagagacggggtttcaccatgt[137 bp omitted]atctactatatattttttatattttcattttatttttaattaagaagtaataattgcatgtatttatggggtacaatttgatgtgtacattgtatacatcgtgatgtgtacacaatgacacgtgtacattgtggaatgattgaatcagcttttccaagtgtgtttccttctcagcacctccaaacctctcctcaagttaaccccaggccttgagagaaacaaagtgctctcccttaaactgggtcgctttggttctcagtggaaagttgagtcacagagggaggctctctttcatgtgcttgggtttcactcacttttatcagctggacactgccgcaggggctgattgctcccactcccttccccaggttctgggttatcgttcatgattccagtggatttccatttttcttcttgaaataaagtacatggagtttatctttatgcactatcatgctatccccaagtgactgaggcattctctaatctgccatcttggaggaagaaaagttttaactttgatatcacagtttacatataatttgtatcaattaacaaattattgtagctatgggtgttttgtagtagttttgtcttttttttttttttaagtcagagtcttgctctgttgcccaggctgttgtgcagtggcgtgatcttggctcactgcaccctacaccttccaggttcaagcaattctcctgcctcagcctcccaagtagctgggactacaggtgcgtgccatcatgcccggctaattttttgtagttttagtagagatggggtttcaccatgctgggcaggctggtcttgaactcctgacctcgtgatccccctgcctgggcctcccaagtgctgggattataggcgtgagccaccgcgcctggccaccagttttgtcttttaatcttcaaactagagagagaattgatttacacctcaccattacggtattagaatgttgtgaatttcacaatgtacttattttttacctataagttcgttttcgttttttttttttttttttttttttttttttttgagatggagtctcattctgtcacccaggctggagtgcagtggtgcgatctctgctcactgcaacctctgccttgcaggttcaagtgaatctctgcctcagcttcccgagtagctggattataggcatgtgccaccatgcccagctaatttttgtatttttagtagagatagggtttcaccatgttggccaggctggtcttggatttctgacctcaagtgatctgcctgccttggccttccaaagtgttgggattacaggcgtgagccagctcgcctggccagttttatatactttcatgttttcatgttactaataaatgactttttccttcagcttgaagaattctctttagcatttcttgtagggcagatataggagtgttaaacaccttcaacttttgtttgtctgagaaagtcttaatttctccttcatttttgaaatacaggttatctgagtatagtattctcacatggcagttgttttctttctaacaatgtatcatcccactcccttctggcctgcaagatttctgctgaaaaatccactgatgatcttattgaggtgactttgtacatatgtgaacataagaagtcactttttccttgctcctttaaagattctctctttgtgtttaacttttgaaaatttgattataatgcacatctgtgtgggtttcttttgatttctcctatttggtgtctttttggctgcttcgatctggatttatatttcctttcacaggcttgggaagttttctgccgttatttctttatctaagctctctgtctccttctcttttatccttctgaccctttggcaatgtgtgtattggtctgcttgatggtgttccaaaagtcccttatgctgtcttcactattttatattcttttgctcctcagattggatgatttccaatgacctgtttctgagtttgttgatcctttcttctgcttgaactagtctgatactgaaccctttattgcatttttcagttcagttgttgtactcttcagcgctaatatttcttttcttttttttttttttaaacagagtcttctctgtcccctaggctggagtgcagtggcacgatcttggctcagtgcaacctctgcctccgggttcaagcaattctcctgctcagcctcccaagtagctgggattacagttgcacgtcaccacgcccagctaattttttgtatttttagtagagatggcgtttcaccatgttggccaggctggtctcaaactccttacctcaggtgatccacctgcctgggcctcccaaagtgctgggattacaggcataaacctccctacttggccatccctaagatttctgtttggtactttttttatattttctgtttattgaaattctcaagattgttcatgcattgctctcctcaccttggtgagcatctttgtgatgattcttttgaattgcctgttgggtaaatcacattatctccatttcagtagggttggtttctggaaattaattttgttctattatttggaacatatttccctgtttcttcattttccttgtatctctgtgttggtttctgtgtattaataagaaaacagtctcagttttttcacactggcctcacatagaacagcctaatcaataagtctaaggttcctctcacatttttgtgtttgtccaaactgcagtctctgtttttagtgacccctaggagattaggatgtgccaagacctagcagtactctgagtcaggtaagatagaaaccagtccctctagatgcagctggaaagattggggcattagctatgtcttccacttcattttatcctcagggtgaagctgagaggagtttatctccaagtctctctgcattaagtcagggagtgtatctgtagcaaatgcctgcactcttcttcagattgcgtgttctgatcctctgctggacgtgggatcattgaatgtccacatctttattttctgtggtctagggaggctcgggaatgctgagctcaatcaacttacagagctaggtggttatagaggcaaccccatggaagggagctgtagaagttatggcactcaatgcatggacaaactccttcagggagcatctacatacctggctttattgctcgagcaaactgagggggaaaagcgcaggaaatgcctaagctcctgttcaggttcccatatgtctattgcttttctaccccactggtttccaggtgcaggatagattctcaaaccggagttgaaaaagtgtgcagatggacacttccagagagaaactgagaggtgtgcactttagaccattctctgcactgatcctgagatg[144 bp omitted]gagaaaccttgtctctactaaatatacaaaattagcaggctgtggtggcgcatgcctgtaatcccagctactcgggagcctgaggcaggagaattgctgaacctgggaggcggaggttgccgtgagcccagatcgcaccactgcactccagcctgggcaacaagagcgaaactccgtctcaaaaaacaaaaacaaaaacaaacaaacaaaaaagccacctctttattctgtgatctagagaaactagtgaatgccaagtcctttcgttcccaattttagatggtttaggatggagcctcctagttgggagctgtgaaaactggggcactctatgtgtggaaatcgctttttttttttttttggaagaatctgtagacatggagtaagccacggggagacttggaaagtgccaaacttccatttaggctcccaagggtctataccctgttagatgtaggctggttagaagcctgtcacgcagcaactggaggagtgttctgggaaaccccttctgtggcaaaagacaaataaaataaatttgccatcttaagactttttttttttttttgagatggagtcttgctctgttgcccaggttggagtgcaatggcactatctcggctcactgcaagctccgcctcctgggttcacgacattctcgtgcctcagcctcccaagtagctgagactacaagcgtctgccaccacgcccggctgattttttgtatttttagtagagacggggtttcacca[140 bp omitted]ctggagtgcagtggtgcaattttggctcattgcaacctccgactcctgggttcaagcgattcttctgcctcagcctcccaagtagctgggattacaggtgcccaccaatgcacccggctaattttttttttttttttgtatttgtagtagagacagggtttcaatatgttggccaggctggtctcgcactcctgacctcgtgatcagctcacctcagcctcccaaactgttgggaatacaggcgtgagccaccgcacccggcccccatcttagacattttaaagtgtactgttcagtggtattaaatacattcataatgttgtgcaaccatcaccaccacccatctttataattcttttcatcctgtcataatgaaaatctatacccattaaacaattaactccccattcttcttctctgctaaaaaccataattctactgtccctatgattttgactactttaagtaccttggataagtggaatcatatagtatggtctttttgtgactggaatatttcacttagcattatgtgctcaaagttcatccacattgtagcctattacagaatgtccttcattttcgaggcctaatactattccactgtatgtatataccacattttgcttacccattcatctatctataggcactggggttgcctccatgttttcggtattatgaataacgctgctataaacatgagtgtttgagtactttctttcaattcttttaagtatatactcagaaatggaattgtttaatcatatggtagttgtaggtttaatgtttttctcttttcttttggagacagagtctctctctgttgcccagacaggagtgcagtggtgagaccacagctcactgcagcctcaatctctagggttcaagcaatcctcccacctcaacctcctgagcagccttctgaggtggcaagggctgaagttgctgtggactgatgtgaatacactgctggaaacttgggataacttggatctgtgccactgctaacattatcatgacattatcaagaattcagggagcggtggctgacgcctgtaatcccagcactttggaaggctgaggcgggtggatcacttgaggtcaggagttcaagaccagcctggccaacatggtgaaaccctgtctctaccaaaaatacaaaaattagctgggtgtggtggcaggtgcctgtaatcccagctacttaggaggctgaggcaggagaatcacttgaacccgggaggtggaggttgcagtgagctgagatctcaccactgcactctagcctgggcaacagtgcaagactcaaaaagtctggccaggcgcggtgcctcatgcctgtaatcccagtactttgggaggccgaggcaggtggatcacctgaagttgagagttcgagaccagcctgaccaacatggagaagcactgtctctactaaaaatacaaaactatccgagtgtggtggtgtatgcctgtaatcccagctactcgggaggatgaggcagtagaatcatgccactgcactccagcctgggcaacaagagcaaaactctgtctcaaaaaaaaaaaaagtttgacttaggggcataaagtacaggtgcacaccaccacagccagcgaatttttatattttttgtagaggttgcccaggctggtctggaactcctgggctcaagagatccccttgtaagtggctgggcgcggcggctctcgcctgtaatcccagcactttgggaggccgaggtgggcagatcacgaggtcaggagattgagaccatcctggctaacacggtgaaaccctgtctccactaaaaatacaaaaaaattagctgggcgtggtggcgggcgcctgtagtcccagctactcaggaggctgaggcaggagaatggcgtgaacccgggaggcggagcttgcagtgagccgagatcgcgccactgccctccagcctgggcaacacagtaagactccatctcaaaaaaataaaataaaaaagagatcccctcctctcagcgtcccaaagtgctatatgtttaatttttggaggaactactctatttttttccacagtggctgcaccattttacaccctcatcaacagggcataagagttcccatttctttttttttttttttttttttttttggaggtggagtcttgctctgtcatccagactggactgcagtggctaatttttttgtattttgtagagaccatgttgtccaggcaggtctcgaactcctgagctcaggcagtctgcctgtcttggccttccaaagtgttaggattacaggcatgagccacggcgccaggccaggttcccatttcttttgatccttgtaaacacttgttattttgtgtattttgtttaatagctatcctaatgggtgagttggtaatcacattttagttttgatttgcaaagcactggcgcatgaaaaaatcttgggccgggtgcagtggctcacgcctgtaatcccaacactttgggaggccgaggcaggcggatcacctgaggtcaggagttcaagactggcctggccaacatggggaatcctcatctctactaaaaatacaaaaattagccgggcacgatggtgtgcacctgtaatcccagctactcgggaggctgaggcagagaactgcttgaacccgggaagcggaggttgcagtgagcctagattgtgctgctgcactccaacctgggcgacagagccagactgtgtctcaaaacaaaaaacaaacaaacaaaaaacttcttcggataaatggctatttaagtcatttacccttttgatctggttgtttgctttcattttgagtattaggaattttctatatattctggatattgatcacacatcagatacatgaataacttcaaatagtgactttgtctaatatctcagttt[136 bp omitted]cggtgaaaccccgtctccactaaaaatacaaaaaagttagccgggcatggtggcgggcacctgtagtcccagctactcgggaggctgaggcaggagaatggcatgaacccgggaggcagaacttgcagtgagccaagattgcgccactgtactccagcctgggcaacagagcgagactccgtctcaaaaaaaaaaaaaaaatcaattaggtaaatgtaaatgggatagacataaaaagacttttcatgtcatttgacatcgtaccattgtgttacttaattactggatacttactaaatgtcttggttggtaccaaataagattaaaaaaccaaaatatgaattgttgaacacaaatgtttgttcttggcattttaaatcttataaaaactctaaataggccaggtgtggtggctcacgcttgtaatcccagcactttgggaggccaaggtgggtggatcacgaggtcaggagttcaagaccagccttgctaacatggtgaaaccctgtctctactaaaaatacaaaaattagctgggtgtggtggcgggcacctgtaatcccagctactcgggaggctgaggcagagaattgcttgaacctgggaggtggaggttgaagtgagctgagatggcgccactgcattccagcctggtggacaggacagagtgagactctgtctcaaaaaaaaaaaaaaaaaaaaaggaaaagaaccaataggacagagagatgtaaacaaagttattaatatgaagatacatttttggtaaggcaagttaaaagcaaaagagaataactttgtatgagaaagaattttatgtgataaatattggtcctaaagtgatttttttttttaaaagaaagcataggacaaagcggaaagtcaaagtatgttgtcaaaggtctgaataagttgtgataaagttagtggtgacagagatctgaattaccccgttaacagtggtgtattcatacaagaccacagcaacttcagcctgtgccttctcagaagaaagaattcaactgaggggaagcagaaaaagagaccaaggcaagtttcagagcacgagtggaagtttattttaaaaagctttagaacagtaaagaaaggaaaattcacttgttagagagccaagcagatgcctgaaggtccaagaaagaaaagaccaaaaaaaaaaaaaaaagtctttggccgggtgcagtggctcacacctgtaatcccagcactttgggaggccgaggaggatgggtcacaaggtcaggagatcgagaccatcctggccaacatggtaaaaccccgtctctactaaaaatacaaaaattagctggacgtggtggcacacacctgtaatcccagctactcaggaggctgaggcagaagaatcgcttgaacctgggaggtggaggttgcagtgagccgagatcacgccactgcactccagcctgggtgacagagcaagacttcatctcaaaaaaaaaaaaaaaagactttaaccttgatcctaggactttatacattcacctctttcccatgattcttcccttagggtgggctccccaaatgcacagtgctttccttacccttgggaattgagcacacacagcatgtttagggagttatatacatgcccatctgaggcttttttcctttatctggtggcatgtggccctggaacatcatgtcgccattttgtctattaacacacatggccaagaatctgcttctccctgggtctgcactcaaattaacacttttaatgttaacaggtgtggaccatcaggagattgtccctccttggaattttcttttttttttttttttttttgagatgggagtctcactccgtcacccaggctggagtgccatggtgcaatctcagctcgctgcctctcgggttcaagcgattctcctgtctcagtctcccgagtagctgggactataggcatacgccaccatgcctggctaatttttgtatttttagtaatgacaaagtttcatcatgttggtcaggatggtcttgaactcctgatctcaaatgatccacctgccttggcctcccaaagtgttgagattacaggcgtgagccaccgagcccagcagaattatcatttttaaagaggcaatgtcaaaactgccatactattacctgacatttctagtgggtgggcagagagccctcacctgccttgctcaggcctaactacatgtaactataaaattcatgaaggattaatttacgcaagaaattttgtgtgtgaccaaattggctataattagaagacaattatttgtctaaatatttagctttgatattaaaatacactaaaatggccaggcgcaatggctcgcgcctgtaatcccaagcactttgggaggctaaggtgggcggatcatgaagtcaagagatcgagacaatcctgccaacattgtgaaacccagtctctactaaaaatacaaaaattagctgggtgtggtggtgcacgcctgcagtcccagctactcgggaggctgaggcagaagaatcgcttgaacccaggaggtggaggttgcagtgagccgagatcgcgccactgtactccagcctgggcaacagtgcgacactgtctcaacaacaacaacaacaacaaaaaaaaaaaaaaagaaagaaagaaagaaaagaaaacaatagccaggcatggtggcgcatgcctatagtcccagctacttgggaagctgaggtgggaggatggcttgagcctgggaggtggcagttgcagtgagccaagattgtgccacaatactccagcctgggcaatagagccagaccttaactcaagaaaagaaaaagggaggcaaaaagacaaataatcctatagaaaaatgagctaacaatatgaaaactctcaaagaggcaaatctgggagcaagtgaggtttatactcatcaaagaagcatacaattaagtagcatcataggatctattgtagagccagaggatatgttgttcttttggacctgactctgacaacatctattaaaaattttaaaataacatcaatcctttgatctaccaatcccttccctgtaatctgacccacagaaataaaaacaactgaaatctaaggggtgattacatgaatttttattgtaccatttcttatggtggcaaataagcaaactgtgagtaaacgagggcagctgaataaatttacagtatacaatattagagaatattatgttgcaattgctcatcttactctgaccatcataatcattctttttgctgggtccaggaccatggctaactcatggcacaaaaagctagtcctggtttggtctgaatttgagtcctagttattctggtgacttcaaggctacccaagcacatgggcaaaacacttaaaaaatatgaaagattatttaagtaaagcaaaatgaggaacagaagaagacagtttagattcatgtacacatacatatattttatttgggtatattacctcagaaaatcaacaactgtcattttcaatcttatctcaagaccaaccttcagaaatgctagtaagtgctacagtaatattaacattatattgagtttaaaagaaattaatatatttaaaatcagtctaaggttttaatgctgtatacccattttcataatcattcaaaaacatcaggccgggcacggtggctcacgcctgtaatcccagcacttcgggaggccaaggtgggcggatcacctgaggtcgggagttcaagaccagcctttggagaaaccccatctctactaaaaatacaaaattagccaggcgtggtggctcacacctgtaatcctagcactttgggaggccgaagcaggtggatcacctgaggtcaggaattcaagaccagcctggccaacatggtgcaactccgtctctactaaaaatacaaaattagccgggcatggtggcgcatgcctgtaatcccagctactcaagaggctgaggcaggagaaccacttgaacctgtgaggcagaggttgcagtgagccaagattgtgccattgcactgcagcctgggcaacaagaacaaaactccgtctcaaaaaaaaaaaaaaatcattagtagcgttctctgtcagtttattgtggaaagaaatcaagtaaacaaattctcaaaaagatttgcttcaaataagagaacactgtttaggtggaagatctcctttttcagcacggtcttcccaaggtaacaagggggttgggattgacttgggtgtgtctgacataattgagaaagaaatttagtctgcaggttaaaagtgaagctgaaatccaggagttaatgttttcctcaatggcttataaaaaaattgaagagtgacacagttttctcattttaaaagtggctaatttctaatgctaatactggttatgcagagtattaaaatttctgataaatgttttagtaaaaactaattctctccatgtctgtgcatatattatttaataatatgatccttaaatgtatgtgatccaaccaatctgtggcaaatcataacctccaagactatatacagattagaactacgtacagattatgtaaaatttactcttgtgacacatgagttattttaattgaatttaagttgccaccccaattaaaaattatttcatattttaaagataagattttagaaatatcttctacagaatattagtatctgactaggaatgtaagtccattatgtttcatgtacagcttcctcactcctatctggactttttaactttcagaagtttaaggaaataaatagcacgaatgatagaatgaacacaaatattaccaccacccagaattaatatttcgttatgtttacttagaatgtttctttttaataagaaatagatacaaaattgaagtatcctttaactaccatgcttggtaacatttcccttccacctcctttcttcctagaggtaaccactccacttttgggaactgagtatatacatatcctttcaatccattctttagttttacataatttatccataaccaattcttagtactagggctggttagtgttgattttattcaaattcacagaagcatcattacaatatgttcatcatttttcttcactctaattttttaaaaatatttctgttaatatatagacttaatttgtcacttaactgctagagagtactctactatgttactatcacattttattcatctatttcacaagagacagcatttgtttcccaacttctggctactataactcatggtgcaatgaactatacagctatagaccagtacatgactccctgtgttcatgtttcttgggtagatgcatatatatagtagttcccccttatccacagctttgctttccatggtttcagttacctgtagtcaccacagttcataaatagttgagaacagtacaataaggtattctgagagaaagatcatattcacataacttttatgattacagtatattgttataattgttccatattatgtttattattgttttaaatctcttgctgtgtctaatctgtaaactaaattttatcataggtatgtatatataagaaaaaaacatagacatagagtttggtcctatctgggttttaggtatccactgggggtcttagagtccatctcttgcagaaaataggggactaccatactcaagagtggaactaccgggtattctggaatgttttagaagttctttcctgccctaaggttttaaaaacatcttcttataaaactgttatattattaagtattgctttttgcattttagtctttagtactttaagaattcataagaaaaatattttatattatgatgggagatattatttttccatatgaagagtcaattaatttttaagtaatccatgatttccccaccaatctgggataccgcctctatcaattaccaattccccatatattcatgcacacatttctgaattcaatattctgtctcagtctcagttttatgactgcttcaacaacaaataattttgatgattctagttttacaattcatatatgtagcaaaacatcacaaaaatgataattttgtctcttaatttcaaatcctcatacatctcatatctatttcttaatgcatctgtaggccttccaggaacacattaagtagtgtccatgactagatcctaactttaatgagtatactcctagaagtacagcattgataatgcttgttgtgggagttttgggggtacgggttttctttacactataatacttattaaacatcatagtatttaagttttgaattgctgctgaaggacttcccacattcatgtcactttaatgtaaaatgaattttccaatacactattaagtgtaaaatctgctgaacgttttgctaaatccaaggcattcatagagaactttaatgagtatgaattctctggtgtctaatgtgatgtgacttttggctgaaagctttcccacattcactacactgataaggtttttcaccagtatggattctcatgtgcagagcaagggttgagaactgagaaaaggctttcccacattcattacaaccatagggtttctcacctgtatggcttctcatatgcacagtaagagatgagctttgacagaaggctttcccacagaccttacactcataaggcttatcacctgtatgaattctcacatgtacaataagtgatgtgattcgagagaaggcttttccacatttattacattcatagggtttctctcctgtatgaatattgtgatgtttaatgaggtattgcttctgcctgaagattgttccacattcattacatttgtagggtttctctccaatatgaattttctcatgctctgtgagatttgacttgccactgaaggctttcccacattccttacacgtataaggtttctctcctgtgtgacttctctggtgtctaatgaggcttgacttctgaatgaaagctttcccacaccctttacattcataaggtttctctccagtatggattctctgatgtataatgaggttttccttctggctaaaagcttttccacactcactacatttaaagggcttctttccagtatggatgttctgatgtttaatgaggtattgcttctggctgaaggctcttccacactgattacattcaaatggtttttctccagtatgaattttctcatgctcagtgagatatgctttgccgttaaaggctttgccacattccttacatgcatagggtttggttcctgtatgatttttctggtgtctgatgatggttggcatctgaatagaaactttttcacattcataaggtttctctccagtgtgatgtttctgatgagaaaggaagttttccttctggctgaaggcttttccacatttattacatttatatgccttctttcctgtgtgacttctaaggtgtagagtaagagatgagactcgagagcacactttaccacattcagtgcattcatgagatttctctccagtatgcattttcttatgctctacaaggttttgcttcaggctaaaagtttttctacattcattacattcataaggtttctctccagtatgaatttgatcatgctgaaggagatctgattcatgctgaagactttccaacatgcctatcatgcatgtgaatttaatcaggagatttccctagtatcaaataagatgtaataaggatgaaagctttcccacattcactaaattcatatggtgtattttcaatattaattctcaggtatctaatgaagttaaatttatgatggaagacttttctcacattgattaccctgagatgagatgattacaaaaagggataaaatgtaacattctctttatattcttaatggttcttatatagcttctcccatatttaggtatagattgtatataaattaggtttcaaattcttttaaactgagttccatacacagaagggtagtcttgaagaatcaatgactgttcagaggaaatactttgtttcctaaattttccctcagtctgtcttttcacagagaaagatgagacttaacttacaagtctttcatgttgcgtctttatctgtttataaacttcccaggcttcttctaaaaggaagtacaaaaaaatcataattgaaaaagttaatataatatatagtgcctggcatgtaataagcgtccaataaattaggttatcattatcatcaacataatatcactaacacctttgaagtttcccattattaatataatttcagaaatgtattactgtaaaatagattcttttttttttttgagatggaatttcgctcttgttgcccaggctggagggcaatggcgcgattttggctcaccgcaacctctgccttccaggttcaagcaattctcctgcctcagcctcccgagtagctgggactacaggagcccgccaccatgcctggctaatttttgtatttttagtagaggcaaggtttctc[131 bp omitted]tcattataaaataaagttcaaatacaaataacattcccaggtatgtgtaattttaattgcttttcaatgtaacccagcacacttcataaatcagtaaaatgagagaaaataaggctaggtatggtggttcacacctataatcccagcactttggaagggtgaggcaggaaaattgcttgaggccaggagtttgagagcagccttggtaacacagcgagactctcgtctctataaaaaatttaaaaactagccaggcatggtgcctgtagtcctagctactgaggagattgaggtgggcagattgcttaggcccaggatttcagggctgcaataagctatgatcgtgccagtgtctgggtgacagtgcaagactcggtcttttattttatttttttgggtcggagtcttgctctgtcgcccaggctggagcgcagtggcatgatctcggctcactgcaagctccgcctcctgggttcacgccattctcctgcctcagcttactgagcagctgggactacaggcgcccaccaccatgccctgccaattttttgtatttttagtagaaacggggtttcacca[136 bp omitted]gatgaaaggacaaatacttaaaagactgggagtgcataggaagacagggcaaaaataaaatgaacagaaaagtttaaataaggtgcttatttctatgtcttcccgaaacaccattaaaatgacagtaaaagggtgaagaaggacacataagaactaaacggttaagaagatatcagtggacaaaaagtattaggaggactagggatagtggctccttcctgtaatctcagcactttgggaggccaaggcaggaggactgcttgaggccaggagtttgagatcagcctaagcagcacagcaaggctttatctctacaaaaattttaaaaattaggtaggtgcagtagcatacacctgtagtcttagttacttgggaggttgaagtaggaggatcgcttgagcccaggagttcgaggctgcagtatgctatgatcatgccattgcaatccagcctaggtgacagagtatgaccttgtctctaaaaaaaaaaaagtattaggaaattttggaaagaaagcaaatagagaactgtaaattaacagcagaactgagtggtttaaagaaaagccagcagatgtgggggccaccttcacaggtctgtaacacagatattgacagatatgctctgtcagtggagaaactgggcaagagtggaaggcagggcttacaaaatgactgtgaaaggaccagctaatgccctgaactctcctagctggacagaaatgtgaagtttatcatccagacaaaaccaagaggctccaaatttagtgatgaccagcaaagtaatgagagcatcctagtaagagaagaatgagtaaaagtttatacacataacagaggctcttctactgttagagtccgagaatgctggtggttactagctgtcagatgatggaagaattattttcttttttctttctttctttttttttttttgggacggagtctcgctctgttgcccaggctggagtgcagtgcgatctcggctcactgcaacctctgcctcccgggtgaagggattctccggcatcagcctcccgagtagctgggattacaggtgcccgccaccacgctcggctaatttttgtatttttagttagagacggggcttcaccatgttggccaggctggtcttgaactcctgacctcatgatccacccgccttggcctcccaaagtgctgggaatacagccatgagccaccgcacccggcccggaagaattattttctgaaaaaatgagaagaccatgagaacacctacagatgctaacatttggaatcatctaacgaaacacatctatattactgattgatgcacagtgaaaaccaccatttcataagccccgcttacatacacaaattaatatagagctaaagatcagaaaacatttgatgaaagtcctaacatcaaaggcagatcaaacaaaatacaaggcaaagagcagaaaaactcacccatataatactacaattaatatcatggaaagttaggagattactattatcactgcaatgaaatattaacagtgttctataaagaggtgtttttagaaataaacaatatgaaattgatcttaaaaattcagtatgttggggaaagaaagtctagaaaatctcctagaataaaaaaaggaagaatggaggaaggcagaaagaaagagtgtaatggttggaacatttagtgggttagtggaagaatctggaaggatcagcatctactaaagaagttccaaagaaagtatgaagaaaaatgaatacaggacattttcaaagagctaataaagaacacttcccagaattacaaatcatgagtccacatacttagcaggcccattgagtacaaagaacattccatttaaaaagatagcggcgaaagcacatcaatacaaaatttcacctagggataaaaagaggatcctagtttgagaccggcctgtgcaacacagtgtgatcttgtctctactaaaaataaaaaagattatctgggtgtggtggcatatacatgtactcccttctacttggggaggctgagatggtacgatggcttgagcccaggagagtgagctatgattaccctactgaactccggcttgggcaagagtgagaccttgtcttaacaaaaaaaaaaaatcctaaatgttccaaaacatttatcctataaaaggaaataaaagaaaaagacataccacatcaaaaaggcatcagattgcaagacaatggataatcctaaccataagttacttccaacttagacttctaggttttacagttctgtctgaaagcttgggaagaatcaaaacacaaaaatggaaaactaagcaaacaaaacaaagaagcaaatattaattaaaagaaaagcaaaaggttatacaagaaatcaaacagagtcatagaaaatcatttggtttaccagtcaacaatgcttacagtgttatagttacgtaaatgcttacaaatgctttaataaaaaagcagtgatcttactagtatcagaagtcagaaggggaagtatgggtataacatactgggggtaacatttcagaaccccgttagtaactgagaaaacaaccactctcaacctctgaattcaaatccataaaatacaatataaataaaaagaaaaatgtatacacatttataacatattttattaatcagtttatcctatatcttgaaaatagattataaaccacctttttaaatgcccaaagaacattctgaaaatcagcccatacagtagcctgttccacaaagtagtaaaggatggacaaaatactctgaccaaaaaaacaaaaaacccaacacatagaaatgacagaacaaaaacaaaacctttcacttgtaaatttcaaaatctattggtttgaacaaaccctttggccagggaaaattaatgcttggagaatgaagttttagcataaaagcttacatcattttaaaaaaagtaataaaataagcactcaaagt[132 bp omitted]catggagaaaccccatctctactaaaaatacaaaattagccgggtgtggtggtgtgcgcctgtaatcccagctactcgggaggctgaggcaggagaaatgcttgaacccaggaggaggaagttgcagtgaaccaatattgtgccactgcactccagcctgggcaacagagtgagactctgtctcaaaaaaaaaaaaaaaagaaagaaagaaaaaggaaagaaaaacagaaaattagtaaaaataggaaaaagaaattaatgtattacaaacagaaaaagagaaataataaattcatgagtggattcttaaggaaaaacttaaaagaagtaagagtaaaaaagaaaaagatatttggaaataactatagatagaaaatatggatagtacagactattttgttaaaccccatgcaaatagaaaacttagcaagtataaccgatgcgaactgaaaccagaaaagacagaaaacctaaacagaaacataaacatagtacaaaatagggctgggtgtggtggctcacgcctgtaatcccagaactttagaaggctaaggcaggtggatcatttgagcccagcagttcaagaccagcactttgggaggccaaggcaggcagatcacaaggtcaggagatcgagaccactctggctaacatggtgaaaccccgtctgtactaaaaagacaaaaacaaaaaaaattagctaggcgtggtggcgggcgcctgtagtcccagctactctggaggctgaggcagaagaattacttgaacctgggaggcagaggttgcagtgagctgagatcgccccactgcaccccagcctgggtgacagagcgagattccgtctcaaaaaaaaaaaaaaaaaaaaaggaccagcctggccaacaccgtgagaccctgtctctacaaacaatttaaaaattaggtgggcgtagtggcaggtgcctgtagtcccagctgctcagaaggttgaggtaggaggattacttgagtcaggagttcaaggctgcagtgagctgtgatcatgccactgcactccagcctgggagacagagtaagaccttgtctcaaaaaaaaaaaaaagaaagaaagaaggaaaaaatagagctcttgccccttaaagcccaaggcatggatggcttagcatgtgaattttactaaactttgattagataatggtattatttattttgttttccacttacttttaaaaaattcatgaaaattggtatgatgcataacagatcaggacttatgctactatattccaaacaatccaaaagaaaattaaaaattacatctcctttgtaattaaaaccctacatccttcacacacttatcagaattgaatttttaacactgtaaatgacaatgctgaactgaactagaaaacataatcagaacaacaagtaaaatggttctttcaacatttatcccatggtttaaaaaatattctcaggaccaggtgcagtggcacacgcctgtaatcccagcacttggggaggatgaggcaggcagatcacctgaggtcaggagttcgagaccagtctggccaacatggtgaaactctgtctctactaaaaatacaaaaattagccaggcatggtggtgggcatctgtaaattccagctactcaggaggctgaggcaaaagaatcgcttgaacccgggaggcagacattgtagtgagccaagattgtgccactgcactccag[138 bp omitted]atggtgaaaccccgtctctactaaaaatacaaaaaattagctatgcttggtggtgggcgcctgttatcccagctacttgggaggatgaggcagcagaatcgcttgaacctgggaggcagagcttgcagtgagccgagatcgcgccactgcactccagcccaggtgacagtgtgagacttcatctcaaacaaataaaaaaaataaaataaaatgaaaaatgctttcaaaatataagtcaaaatgctctaatggcaagcaaactcttaat[138 bp omitted]catagtgaaaccctgtctctactagaaatacaaaaaattagctgggcgtggtgacatgttcctgtaatgccagctacacaggaggtggaggcaggagaatcgcttgaacctgggagatggaggttgtagtgagccgagatcacaccattgcactctggcctaggcaacaagagtgaaactccatctcaaaaaataaataaataaataaaataaaaaaaaacaccacaaggttggcaaactaaaagagtttttctggaacatggccatgtttatttattttcttgtccatgactactttcacagtataatgcttgagataagtagctgcaatggagaccctgtagcctacaaagacttaaatattaaccatctggccctttacagaaaaagcttgctgaactcctgtcctagagtagcaattcctccatcttctatctggctgaaaccaggttgcattgttgatccagctccaaccacaaccagataataaagagagaacctcggaggaatccatatgtttcagggaccataagcaccaaagttagcatgcaaatctggactattcaccacatgagtgttatgtgaccaagaaatcaattcctacattccttaaactggcactttgaagtttattatagtcacttagctttactgtgattagtacacttcttattgctttacatatcatgaatctgagatgcctaacaaatactaatcaccagcctggacctctctcctcaacaatcaattcaaatatccagctgactactcaacatttccacttggatgtctaatagtgatctaacttaccctgcccctattcaaactcttgctccagctcccaaaccaactcctctcaaattcttctcatctctttaaatagcaatctcattctccttgctgctcaaacaatacttctctttcagtcagattgcacactctttacaacctcgtagcttactggctattttggacaatcctcactgtgaccaccaaggtctaagccacatgtcttgccaggattatttaacagcctccttaccagtcttgctactttagctttcaactctttacagttctcaacacagcagccacagtaatcttgtcacagtccaatcacatcactgctctacttgaaagcctttttgtatcctcataaaaacatttagaagcatacagcagacactgttaacagtggctgcttctgggaaacaggggattgagggccaggaatgaagagacatacctgattgttttaattttctatcaagtatacatattaaattttgataataatagtattatttctttttttttttttttttgagatgggagtctcactctgtcgcccagactggagtgcagtggcatgatctcggctcactgcaacctccgcctcccaggttcaagtgattcttctgcctcaggctcctgagtagctgggattacaggcgtgtgccacctcgccaggctaatttttgtatttttagtagagactgggtttcac[132 bp omitted]gaactaataggaagtcagcactaatccctaagcctgtaatattgttaaaaagcaggaggtgacatagtgttgaactatgatggctggaggtaggaagacaatagaaaacaagagtaaggaagcaaaattcaattctgaggaatataacaatggaaggagaaagaatgatagaaagttaaaatgtaaagaaaagaatctacttgctagtctttgaaagtttttttattgatacataatagttatacatagaatgattaatttattttatttattattattattttttagacagagtctcactctgttgcccaggctggagtgcactggcacaatctcagctcactgcaagttccacctcccaggttcacgccattctcccacctcagcctcctgagtagctggaactacaggcgcccgccaccacacctggctaattttgtttttgtatttttagtaaagacggggtttcaccg[137 bp omitted]ttttttttttttttttattgatcattcttgggtgtttctcgcagagggggatttggcagggtcataggacaatagtggagggaaggtcagtagataaacaagtgaacaaaggtctctggttttcctaggcagaggaccctgcggccttccgcagtgtttgtgtccctgggtacttaagattagggagtggtgatgactcttaacgacatgctagtttttgaaaactaacagatctatgaaggactgaatgcttaaggaaacgcatctaggcatacagggaaaagtgaaaaatggagaatgttagtgaaaggaagaaaagtgaaattgaggctgtaaaaaaatcataaaattgaggctgcaaatgatgtagaatgactggcatccagaatagattttagaagagcaatcagtcctctagaatctgataaaagggatgcatagattcaggaagacagtctggaaatgtcatttaggtatctaaagaattcccagcaacagtcactctaaaagacaaaggctagtacgaaaatctcaaaaaaacaaacaaacaaacaaacaaaaaaaccccacaacaactcagaggctgcaaattctcactgaataactgcaataagtctttatctcattcatacctaccaggttcttgcttactcacacaaagagaaccttctttacatttctttctcaatcatctgttgctgttcttttaagtgctgactttaaacttgtgagcagaaaaatgacactggacttggatgttatggttggggaacaaagcagcatcccaaaattcagggagcgcccttagaactctaagaggttttgcagctcctgtggatatacaaggaagcaggcctgtgaaaaagaacaaagtaatgatgattctttggctttgacctacatgtgagcaaatggaaaaacagtatttgtacatagcacctcaggccagacccattatgccattcaaaagctctacacatttcaatggccgggcatggaagctcacgtctgtaatctcagcaccttgggaggccgaggcaggcagatcacttgagattaggagttcgagacccgcctggccaacatggtgaaaccctgtctctactaaaaatacaaaaattagccaggcgtggtggcatatgcctgtagtcccagctactcaggaggctgaggcaagagaatcacttgaagccaggaggcagaggttgcactgaaccaaggtcacgccactatacaccagcctaagcgacagtggagactccatctcaaggaaggaaaaaaaaaaaaaagctctaaacatttcaaaaatgagaaacagaagggaccttattttcagaatttaggttacacagagaaactatgagagactaagatgccagagttatccacaatcacaacctgtataggttccttcgagcaggtgtcacttgtgaccttgctcctgagtgaagtcacatctttgcatataatttttccccataacacttttctcataagtctgaagtaaccaaccttgagtgatatggaaaaaaatacaggaaattattctgatggtatttataggtcagagctctaaaaaatttagaggactaatattttacttagattaactaggagaagttaaatatagtaagtgtcctataataataatcttcccttgatatcacaggagattggttccaggatcactgtggatacca[141 bp omitted]gtgaaaccctgtctctactaaaaataaaaaaattagctgggcatggtggcacacacctgtacctcagctacttgggaggctgaggcaggagaatcgcttgaacccaggaggcagaggtggcagtgagccgagattgcaccactgcactccagtctgggtgacagagtgagactccatctcaaaaaaataaaaataaagtgaatggaagtatatttacatataacctatgcacatcctcccatatactttaaaattatctccagattacttatcatacgtaatacaacgtaaatgtctggtaaatagttgttatactgtattgtttagggaatcatgacaagaaaaaaaaatctgtacacgtacagatacaaccatcgcaagcttaacaacagttatgattcatgtttgttgaatccgtggaagcagagcctacagacacagagggctgactgttcattcactgattcagcaaacatatacatttatgattatgtgtgctgagaaaccttggtttacaatttgtaatgggatataacaaatcaaaggatcaaacttacttagaagccttctctaagatgtaagtgccttagaacctggctagacagtgctataaattgctgaaacaggtacagaggggaaatagatggaggcagactgcaggaagaaggagccctttagacataaagagcttgaagttccctgtaacttccaggtggactgcacattgggcaattagataatatggattaggagctcaggacaagcctccagcagaaacagacatttattagtcatctgtattagatgaagccatggatggcagtgtaatgttgttgctgataggagtacttagatgatcaaggccagaaacttagaaacaccaatagttaggggaaaagcagaaactaagtcctgtcttctttgtatcttttactttttctgtatatttcaaaactattaaccctgttacttttttattttattgaaaaatatgttaagaataagtgtgacaagatacttgaatatgttgatatgttaagaataagtgtgacaagatacttgaagataggatacttctatctttgtatacacaagaaaagaatttcccctatatttacaaaaggctggggaaaccctgattaaattaggagtgagattgctgccctcactgacgaactagggagtttcttgacctctgcgctaaaggcaggacaagtagcttccaaattctgtgccgtctgcgctattggaaactacctcttaaagatattccttagttcagggtttctccaagcaactgcaccaaagtttctccaaagtattaagaaaagtcaatgcctactgggtgtacaggcacccagtaacaagtttttccgaaatcttgcctctttaaaaaaataatggaaaggtaatgctgattttgttttctactccacaataggtctgcttttatataaaaaatcacctttaaaattacttatccgctcaattccttagccttttccgtttcctattttccagaaaacgcatctttattattttagaaatgagaaaagtgaggcttagaggttactacctcacaaagccatccgtccatcctcacaaacttggaaccagtttctcactaactctgcaccctcaacaccccctcacactctcggtcacccacccgcgaacccacccgaactgtacccctgcccccagccacacaagctcggatcaccgcacatcatagaaggcgattcctcccctccatactcccagccccgtcgcaggcactgcaaatcctcccctccagcgtccctggcccgtttcagtgtccagaaacccaagtcccacagggccgaaacccaactcaccggcagacaaagacgaccatggcaagtcggagattccgcgcctgcgcactccttccgcgggcagcgctcccagaggtctcctgggctgggccaggccccgactcagaaccggacggaatcgagagatcttggcccgtcctccgtgccactcttttgagggtagactacatttcccagaaggttcagcggtttgagtcagcttttcgcgcgaacttttcctccgccagagcttgtgggactgtctccctggccggggcaggggtgtaaggccttagtcttagtttactctatccctgggattgggtagtggtgtaacatcagcttaaacacgctgtgctgactttatgtaacagccacggtgcgatactaagccaggaaccccaggagactctcagacacggttcgggaatgagggtaatccctttggctgggctcaagccgggcgccatcttgctcatcgcgggcgtggcgctgaactacatttcccagaaggcgccgcgccctcggcccctcccctcgcgactcccgcggctcgggggagagctgcacgcgacccaggtgctggcctctgagcgggtcggctcggagactacaggatcaggaggaggttggaggtgaagcgtctggaatccggtgcggaggttgagactgagtattaagtctgttcaggcggaacgcgccgagaagggcggttgtgaaattgtgtttttgtgaatgtatgtcctagcacagtgtgtgtgtgattgtgattgtgtgtgacaccttgtgtacggatgtggggaggactctgcgggtgtcccgtgagtccctgtgttaggactgttattgtgtgactgtgtaacgctgtgtgagggtgtgggttagctgtgactgtgtgcccgcggtgggtgtgtgattgtaactctgtgaccatatgttcgtttgtgtgcagatatagggagctttgtacttatgtagttgtgactctgtgtccttgtgtgggagtatggagggtgggtgcttgtgactttgtgtacagtggtgggtgtgtgactgtgaagcattgggtgtgcgtggagttgagactgtgtttgtgtgtctttgaccaaatgtcacacatagtcatatgtgagagcagaagacagctcggccccgtgatagtaaaggggatttttctatgacactgagttttgagttggaagccccagtttcctctgatagccctcccatggcgggggaggggaacgcagagtaagctctggccttgtcatttgggccctaggggaggtgtattgtctcccttctcatttctgtcctccaagagaggttccccagaggagaggaaataacggttgtgatatctaaaagccatgtttaaggtgccttgaagttttctctttgttcctgaaatgctttatttttccaggacctgattttttttttttttgagatggagtctcgcactgtcgcccgggctggtgtgcagtggcgcgatctcggctcactgcaacctccgcctcccaggttcaagcgattctccttcctcagcctaccgagtagctaggattacaggtgccggccaccacgcccgggtaatttttttgttgttgtatttttagtagagacggggcttcactatgttggcctggcttgtcttgaactcctaaccttgtgaaccgtccacctcggcctcccaaagtgctgggattacaggcatgagccactgcgcccggctgattttttttttcttagcaaatgcctaaaaggacttatcaagtaacctggaatcttctgttactctttggaaaaatcttcctaattttgtcttattaatatagcaaatggttcagtttatcatgtatgcttagtttggttttacctatatacatatgtagatatatatgcatatacataaatatacatacacatatttgtatatgcacatattgaaatgtatctcatgttttaagtgatattttaacttcctacataattgaaagctatttgagaatatattaaattgtagatactgttaattgttttgccacatatgtggctaacccaatatccattcccttctttattgctataaaagtcctgatcttgtttgctctgcttaaagaaaaacaaacagaaaacaaacaaaaaacccaaactctacgtgttctagcttctcctgttgatgtaagttaaagttcttagattgggcttctcagacagtttttttttttttgaaatggagtcttcactcagtcacccaagttggagtgcagtagcgtgatctcagctcactgcaaccttcacctcccgggttcaagcggttctcctgcctcaggctcctgagtagctgggattacaggcgactgccaccatgcccggctaatttttgtgtttttagtagagatgaggtttccaccatgttggccaggctggtctcgaactcctgacctcaggtgatctgcctgcctaggcctcccaaagtgctgggattacaggcatgagctactgcacctggccactcaggcagttctttaaaggtatggggatggggtggggcaggctcagtgtgcatacattctttttcccctttctgtctggaatgtggatattgtgctacatgcagagcagctatctcataaccatgcatttttttttttttttttttgagacagaaacttgctctgttgcccagtctggagtgcggtggcgcaatctcagctcactgcaacctctgcctattgagttcaagtgatgctcctgcctcagcctcctgagtagctgggactacaggcgtgcaccaccatgcctggctaatttttgtatttttagaagagatggggtttcaccatgttggccaggctggtctcaaactcctgacctcaggtgatccgtctgcctcggcctcccaaagtgctgggattacaggtgtgagccaccatgcccggccataaccatgcatttataatggaaggaaggagatgagagtttacaatgtcatattaaatgaaaatagaggattttaagttatatatgttgtgtgaaagcaatttgattagaagatatgtatattctacctatctatgcatgaaatgtgtagttgcactttaattttcttcattgtaactagactcaagcttgtgaaagaagggacttgtctttttgtttagttgttccatcttcaccatttacaatggctagcacatagttggctctcagtaaatatttgattaatgaaagaatagtaagtagttaataaatgatagcagtgctacttagtttctttttggttgcacagaggaaacatgcccagattgccttaggtttctgttactctctgagattactctgtgttaactctacctctggggtagtgaagaggtatgccaaggggtgttataagccaacattcttcagactgggtataagttcttcatcatccataggacttttgatgttgggcgaaagatattcactgctttgattatttattgttttctttgattatttattaagtttctgtaaagcataaaatataaccaatttttctcacatttaaacttgattattaattttgattaatatatatttcttttttttttttttttttttttgagacagagtcttgctctgttgcccatgctggagtgtagtggcacactctcggctcactgcaacttccacctcctgggtgcaagcgagtctcctgccttagcctcctgagtagctgggattacaggtgcacaccaccacgcctggctaattttttgtatttttagtagagacggagtttcaccatgttggccaggctggtctcgaactcctgacctcaagcaatccgcccaccttggcctcccaaagggctgggattacaggaatgagccaccgcacccagccaattctttttttttttttttttttttgagacggagtctcactctgtcgtccaggctggcgtgcagtggcactgtctcggctcactgcaacctctgtgtcccaggttcaagcgattctcctgcctcagcctcccgagtagctgagattacaggtgcccaccaccactcccggctaaatttgtatttttagtagagatggggtttcgccatattggccaggctggtctcgaactcctgacctcaagtgatctgcctgccttggcctcccaaagtgctgggattacaggcatgagtcaccgcacctggccagatttggattcttaaatgccaattgagttcttaacagggaaatactagaagcatttccgttacataaggaaagagacaagaatatatgtatcaccattactatttaactttttttttttttcttgagattgagttttgctcttgttgcccaggctggagtgcaaagatgcgatctcggctcaccacaacctctgcctcccaggttcaagggattctcctgcctcagcctcccgagtagctaggattacaggcttgcgccaccatgcctggctaattttgtatgtgtatcagagacagggtttctccatgttgatcaggctggtctccaactcctgacctcaggtggtccacctgccttggcctcccaaagtgctggggttacaggcttgagccaccgcacccggcccttaacttttttttttttttttaagagatgcttggtagagtaattaaacaagtaaaaagattcagaggcaaaaaaattctgaaaagaggaaataacaatgacattaaatgcataattccataggaagtatgtctggaagataaatgtttatgtatatatttttaatcaccctctgaacctgaacttgagttaatcagactcatttatcactaatctttaaaagggctctattgatctgtttccaacaccatactctacttccattctccttctgctgtagacacattcaaaatgattaatttgttggacgcggtggctcacgcctgtaatcctagcactttgggaggatgaggcaggcggatcacctgagttcaggagtttgagaccagcccatccaacatggcaaaacccccatctctaccaaaaatacaaaattagccaggcgtggtcgtgcacacctgtaatcccagctactcgggaggctgaggcaggagaactgcttgaacctgggagatggaggttcccgtgatcgaggtcatggcattgcaatccagcctggatgactgagtgagactccaactcaaaaaaaaaaaaaaaaaaagattaattttatctttatgcttgaaaatgttcttacaaagcatatattttacatacgtgtattaaatatatatatatataaatgtctcctgttctttttcagtaatcatagtgtttttacaattatctgttactatgtaaacatttatttcaaggcattggtcacgttacctacctactcttccagggaatggacatgcagattgccttcataccctcccaccacaggaaatgctgaaattaataatctcatacatatccctttatgggccagtttgagaatttcttaggtcacagaatttctgggtcataggatatgagtttacttgactaagtggtgccagattctctccggattggttgtaggagtccagactcccaccagtatggaatgagagtttccatatcccacatctgtatgaacacagcactgtgtagctgtctcatagttatcagtctaaaaggtataaagtagtatttctttgtagtattaatgtgcatttctcattgccagtgattttgaatagcttttatgcttgttagctttttcagcttgtttgtaaattgccttttgtaccttttgttaaaatgtaattgggattagtctttttcttgttaatttgcaaatgtttatgttttctagatattaactctctgatagttttagactctgctgataccctcttatgtattattatactttttattaaacagaaatacttattttaatattattgttatgtgtttgtgtatatg[137 bp omitted]catggtgaaaccccatctctactaaaaatacaaaaattaatcgggcgtggtggcgggtgcctataatcccagctactcaggaggttgagtcaggagaatttcttgaacctaggagacggaggttgcagtgagccaagatcgtgccactgcactccagcctgggcaacaagagcaaaactctgtctcaaaaaagagagaaaaaaaaaagaaacatttttcttctctaaggtcacaaagaaattcttctacatttttgtctcttgactttgtagttctaccttacacagttaggtctttaacctattccagagtaaaattttgtattttcaaaaaaaaaactattctcccataattgtctctttcagcccttctctgtgagatggtattttttcctgcctctggatgaaatgtctgtcaagtgtcattatagtcattcttaagtaataaaaaatccagtagacaagatcagccttaatttgctaaatgaaatacctggtatattacaataattagtactctgaactgtttaaaattaagacttcttcctacaactgaatcttaggtaaagatggacacctgcatgagggaaggaatatgtgagcagcttccatttcccttccatggtcttctcagcttcctccaacagtagattgttcagcctccctaaagcaggagaagaggaaggggaagaaaggtaagagacagtaaaggtcttacttaactggtattgttataatcagtgtttggttctctcctgccttcatggatagtcaaagctgaccctttttcttattgttaggtgtttttccgggtttctaagcaaataccttgctgcagatcttcaactgcaggggagggcatgttgccagaacatcctgtttacagaggccacttaaaatccttacgttaaccctaggcatactgtggtcatccttttctggtgggtcacattggccctccagaagttctctagaacaggatccaagatctcctgaggtcagctcactccgtatggtccatatcctgtcaccacgtgggaattaagttcctatctctgtttctcctaaatggcaggaaaaaaggtaaagttctcctaagaactctcttaacacactcccctttggatcttagagggactgggatggatcgggtcaacttgcttggtttgattagaggaggaaacacccacctcctttcctcagggtgctgagaacacacccacagctcttcccaaaaatagtctcacctcacaaaaagtcctcttcctcagcctccccagcctctcacatgtccttgaggtatgttgaactgtagcaaaaattgtttatagccagtttcttttttttaattttaattttttaaaatatggtcagctgggcgcagtggctgcctgtaaccccagcaatttgggagggtgaggcgtgcgaatcacctgaggtcaggagttcgagaccagcctgaccaacatggagaaaccccatctctactaaaaatacaaaattaaccaggcatggtggcacatgcctgtaatcccagctactcaggaggctgaggcaggagaattgcttgaaccccggaggcagcggttgcagtgagctgagatcgtgccattgcactccagcctggatgacaagtctcaaaaaaaaaaaagaaaagaaaagaaaaaaaaagatagggtcttgctctgtactccaggcaaccttggctcactgcagcctcaacctcctggactcaagtagtcctcccacctcagcctcctgagtagctgggactacaagcacatgtcaccacatctggctaatttttatagttttttcctagacggcacccggcctagaaagcaattttaaacaatgagaaatttcaagaaggtgactggatataaaatatgccaaaatagtacacataatgtatatgatatacatatatatatgaaaacaacaaatagaagattcaattgagaaagttttaaaagaccccagcaatgatagacataaaaatatgttactaaggaataaaattagcaagaattggtataccttatgaagagaacttgaatatggagggactaatcagaaaacaagtgaaaaagcatagtataggatgcctcaaactcctaagggtttaaaacttaatttgtaataatttaatgtgatcccaatctgataattattttattaataaattaataattgttttattaaagacaagttaattctgaagttcatgtggaaaagtcaatatggcagaatagccaggaaaattctgaaaaagagtaattcagaacatttactctaccatatgtttaaacataaaataatagccttggctgggtgtggtggtttatacctgtaatcactaaaagcacttcgagaggctgaggtagatggatcatttgagcccaggagtttgagaccagcctgggcaacataatgaaacaccatctctacaaaaaatacagaaattagctgggtatgttgacacatgcatatagtctcagccatcctcccaaatgctttgggaggctaaggcgggaggatggcttgagcctgggaggtcaagactgcagtgagctgtgattgtactactgaatttcaccctgggtgacagagtgagaccgtctcaaaataaaataaaataaaataaaataaaataaaataaaataaaagtcttaaaatagcatggttctgacagatgagcagacggatcagtggagtggaagagaaactccagacccagtaggtagtgcagtattcttcatatggtaaagacagcatttctaattaggggcacacatatggatttagtacttcgtttataatatacaactgtatattgtaaccattgtagaggggaagaaaataggtcgttaacatttcatatctattattccaagtggatcagagattcaaatgtgaaatatgaaatcataaaaattctcgaaataatgtggaaaaaatgttagcctcaggacatggaaatcattctaagtctaacacaaatcctagaacccataattgaaaataataataaatttttttttttttgagacagagtgtcgctctgttgcccaggctggagtgcagtggtgcgatctcggctcactgcaagctccgcctcccgggtgcacgccattctcccacctcagcctccggagtagctggcactacaggcgcccgtcaccacgccggctaattttttgtatttttagtagagatggggtttcaccatgttagccaggatggtctcgatctcctgacctcgtgatccacccacctcggcctcccaaagtgctgggattacaggtgtgagccaccacgcccggcctaaattaatttttttacttggcaaaaactattaatgctaaaattccaaaagataattgatagcctgggaaaacttacctgcaacatatatcccagaaaaagttaattttaatgaaatgaaagtactgcatatctaataaggaggaaaaataatcaaaaagaaaataagcaagggatacagagatggttcatagaaaaggaacaaaaaatcgccttttggtatgcatgttttcatctgtttggactatcataacaaaatatcacaaactgagtagcttaaaaaacataaatttattttcttatagttttgaaggctggaagttcaagataggggtgccagtacagttgatttctggtgaagggctgtcttcctgacttgtagatggccacttgctttttgtgtcttgacatggctgttattccgcatgtgggaggagagaaagaaatctctggtgtctcttcctcttcttgtaagaacactatcagattaggttcccacacttacaactttcatttaagcttaatatctccttaaaggtcctatctccaaatccagttccatcagtcattagggctttaacatgaaatacgggtagacacatttcagggtacaataatgtgaaaagataattatcctcgctgataggaataaaatataaattaaacctacaatttttacctagtaaaagtttaatgtgaactagattttttcagatgtaaggccaggtgtggtgactcatgcctgtaatcccagcactttgggaggccaagtgggcagatcatttgaggtcaggagttcgagaccaacctggccaacatgatgaacctctgtctatagtaaaaatacaaaaattagccgggagtggtggcatgtacttgtagtctcagctactcaggaggctgaggcaggagaatcacatgaacccaggaagagaggttgcagtgagctgagatcatgccactgcattccagccaccttttttccccaatagtgatatggttcaggtctgtgtacccacccacatctcatgtcaaattgtaatccccagtgttggaggtggggcctggtgggaggtgattggatcatggggtcagatttcctccttggtgctgctttcatgatactgagtgaatgcttgtgagatttggttgtttaaaagtgtggcacgtccccactctgtcttcttcctggtttggccacgaaagacgtgcgtgctttcccttcaccttctgccatgatttaagtttcctgaggcctcccgagccatgcttcctgtcgagccatgagccaattaaatctcttttctttataaattacccagtctcaggtatttatttatagcagcgtgaagaatgaagtaatacaaatggcttttgaggtacatgtggtttttggttatgtggatgaattgtatagtggtaaagtttaagattttaactttcgcggtggctaacgcctgtaatcccagtactttgggaggccgaggcaggtggatcacgagatcaggagattgagaccatcctggctaacatggtgaaaccctgtctctactaaaaatacaaaaaattagccaggcatggtggcgggcacctgtagtcccagctacttgggaggctgaggcaggagaatggtgtgaggcggaggcggagcttgcagtgagtctagatagcaccactgcactccaggcacttgtaacagagcaagactccgtctcaaaaaaaaaaaaaaaaaaaagattttaactttttaagaaactgccaagttagaaaattaaagaaactagaaaagagcaactaaatccaaagcaagcaaaagaaaaacaataaagatcacaatggaaatcaaagaaacagaagacattaagacacatactagaaaatgtctgaaaccaaaaggtagttatttgaaaagataacttgacaagcaaacttgacaagcaaaaaagaacacaaattaccaaaatcagaaatgaaagaagggaaatcactatcaaaaacctacaaaatttaaactttatgctaacaaattaggcaaactagataaaagggaaacatttctggtaagtcataaactatgagaaccaactggaagaaatttcaaaacttgaatagacctataactaaaaaaggactttattaaaattttccatgaagaatagcccataaatagaaatctatgaaatatttaaagaaaaaataataccaatacttcacaaattctttcaggaaacagacaagggaaaggaaacaattctgaggtcatactatgaggccagtattaagcctataccaaaggcagattttaaatatcaaaagaaaggccaggtacagtggctcatgcctgtaatcccagcacgttgggagaccgaggcgggtggatcacgatatcagaagtttgtgaccagcctggccaacatgggaaaaccctgtctctactaaaaatacaaaaattagccgggcgtggtggcttgcaactgtagtctcagctactcaggaggctgaggcagaagaatcgcttgaacccaggaggcggaggttgcagtgagctgagacggtgccactgcactccagcctgggcgacagagactccatctcaaaataaataaataaaataaaataatacaaaaattagctgggtgtggtggcgggtgcctgtaattccagctacatgggaggctaaggcaggagaattccttgaacccaggaggtggaggttgcagtgagccaaaatcacaccactgcactccagcctgggcaacaagagcaagactccgtcttaaaaaaaaaaaaaaagtaaaaataaaataaaataaataaatatcaatagaaaaactgcagaccatgaactacagactctcatgaacacagacacaaaaatcctgaacaaggccgggcgcagtggctcacacttgtaatcccagcactttgcgaggccaaggcaggcaaattgcttgagcccacaagtttgagaccagcctgggacccatggtgaaaccctgtctctacaaaaagtaaaaaactagccaggcatggtggcgtcactgtagtaccagctactcaagaggctgaggtgagagcatcatctgaacccacggaggtcgaggctgcagtgagccacgatcgcgccattgtactctggtcttggcaacagtgtgagaccctgtctcaaaaaagaaaaaagtccttaacaacaacaaaaaacactgaaaaaaagcatctgacagaatcccaaacccattgataagctctcaacatacaaataagttgaaaatatatgatttcaatagacacaaaaaattatttgatacagtcccacatacatgcctgatttaaaacatttgaaatgctaggaatagaactaggaaaataaaggagtttcctcatcctgatgaaaggtattgtatcagtcaggcttgaataagacaagcagagtcaataagagatatatacatactgtatctatatattaagagatttattagaggggattggcttgtgcaattatgggggttggttaagcagtctctataagggtgtatctctctgatgctacagcttaaagtccaggcatggtacctggagtcctagctactcaggagactaagtcaagagggattgcttgagcccaggaggctgaagatgcagtgagctgtggttgtgccactgcattccagcctgggcaacagggtgagaccctgtctctaaaaataataatgaagtaaaaataaataatgtaaatgtttcatgcagaaatgaaaagatactagaaagtaacacaaagctacaggaagaaataaagaacactggtaaagataactacataactatgtatttacataggtaaatacaaaagccagcaatattgtatttttggcatgtattcccgtcttcttcctatatgatttaaaagaaaaatgtagctgggaatggtggctcatcctgtaatctcagcactttggtaggccaaggtggatggatcacttgagctcaggagttccaagaccaacctggagaaactgaaaccctgtctctacaaaaaatacaaaaattagctgggtgtggtagcaggcacctgtcgtcccagctcctcgggaggctgaggcaggagagtcgcttgaacccaggaggcagaggttgcaatgagccgagatcgcaccactgcactccagcccggatgagactcccatctaaaaaaaaaaaaaggtaactgcataaaacagtaattataagtctctgtaaatgggcacacaatgtttaaagatgtaattcctgtcaataataatataaatggggaaggacagagatgtataggaccagaatttttgtaaatattgaagctaagatagtattaattcaaagtagaatatgtgttaactccaaggcaaacactgagaaaatgaatacaaaatttacagaaaataaaataaaggaaccaaaatgatacagtaaaataaattcgggccaggcatggtggcttccgcctgtaagccccttgggaggctgaggcgggcggatcacttgaggtcaggagtttgagaccagcctgaccaacacagaaaaaccctgtctctactaaaaatacaacattagccggccgtggtggcacatgcctgtaatcccagctactcaggaggctgaggcaggagaattgcttgaacctgggaggtggaggttgctgcgagctgaggttgtgccattgcactccagcctgggcaacaagagcgaacaccatctcaaaaaaaaaaaagaaaaaagaaaaaattccattaaacacaaaaggtggcaatattgggagaattaagaaacaaaaagagacatacacaaaacaaattaaaatatggcagaagtcagtcctttacaagcaattaatttaaatgtatattgattaaactctccaattaaaaggcagagattgccagatggattaaaaaaaatgatccaactatatgctgtccataagagactcagtataaatcccaaactgtaaatagtttgaaagtgagaggagtggacaaagattccatgcaaatagttaagcaaaagagaggtagggtggctatgctagtatcaaacaaaatagactttaagtcaaaaatttttacaagggacaaaaaagacacattatatattgataaaacggtcaatgcatcaaaagatataatagttataaacacaaacacaccaaacagccccaaaagaagtgaagcaaacactacaaaaagttgcaggcaaaaaaaaaaagttctacaacagttggagtcttcaaaacttcacattcaataatggatggaacatctacacagaagatcaagaaggaaatagaaaactggaagattatcaactaacaacacctaacatgtacacaacactctaccccaaaacagcaaaatacacatttcctcatttttctcagtatggttaagaatttcccaaatcttcacattttagtttcttattgcttaagaattcctccttcaattcatctctctcctttcctgttttatatgcgcaataaagggaacccaagccacaagttcaataattagaaatctccgctactattcagttttcattggttggaagcgctaccttccacaaaacactagaacatgattcagccaagttccttgctacaataacctgtttctcatttctgagactaaaacattatggccttaaatgtccatatttctaccaacattttgttcatgattgtttctttaacatgaataccgttcatgacaggattctttaaaatggaagctttctctccagtggttctattttttttttttgtcctccccagaatcatttttacatccatatttctagcatctaccctcagcattcttctagcctatttgcccaccacccagttccaaagcttggacttgcacatttttagttttttgttatagcagcaccccacttctcagtaccaacaactgtcttagtttgcttagggtgttgtaagaaaatgccatagactgtgaggcttaaatacagatatttattttctcactgttctaattaaaatagggattagcaggtttaattcctggtaagggctctcttggcttctccttgtgtcctcatgtggactttcctttgtgtgtgagcataggaagagacgtctctccttcctcttctcataagatcaccatttgtatcaaattagaatcacattcttatgtcctcattgccctatgtccaaatacaatcacattgcaggttaaggggtgaattctggcaagttggagttggggtggggggtggcgcaggggttatataactccagaaatctcagtcacagactctttacctgtccctaacatacatatattagttgccattaaattgaattccttcaaggacatataaaatttaatggtgcaggacagcagaaaacaggatgagactgcaatatcctatcctattgaatatgagaataaagctcctatgcaggcttagagaaaagtcagaaagaataaaggggcaaatgaaaatggaaagaatggtgaagttttatgtttttgagtaaaaatagtaaaaaccaaacagtaataccaccaataataattatattatggtttcgagtaagtgtgaaatgccataagttcattacgaagttaagtgaaaaatgttaatatgataaaaatatagctgtaactacaaacaaggaaaacataataaggacacattttattcattaatttattatttgttaatgacttcaaaaagtaaaagccaagacacaaggatattttgtttctctcactaattttaatgtctgtatacaaggtttagatatttagttttaatttgtttaagctggaaggaaaaaaacacacacaaagaaatataggacaagttctcctggagaactatacccaaaagaggaacattagcactgatggtaactcaggataaaaagggagaatgagatccaagagtaaattagctgtgttgttacataaatagaatttagttagaaatagagctactactctatttcaaagatatgaaatagcaaatatcctgacaaaaaggttaacatactcttgttcttactgtgtaggacatgaaacaacaaccaattacatatcttttaaaactacttgaataagcaatacttacataaaacatagctcaatatatcagatgagaaaatggcttaatactggtaatcattcacaccgttatagagtacataaattctgggaaagacatcagtttcaaaaattaaaatgtaatgaatgacagtgacataaatttatctgaaaataatagtaaaattttcttataaaaatcaaataaccggacaggcgtggtggctcatgcctgtaatcccagcactttgggaggccgaggcagggggatcacaaggtcaggaaatcgagactgtcttggccaacgtggtgaaactccatatctactaaaatacaattagctgggcatggtggcgcatgcctgtaatcccagctacttggcaggctgaggcaggggaatcgcttgaacctgggaggtggaggttgcagtgatctgagatgacaccactgcactccggcctggtgacagagcaaggctctat[131 bp omitted]gagatatcccgtctctactaaaaatataaaattagccggtcatggtggcgcatgcctgtaatcccagctaatcaggaggctgagcaggagaatagcctgaacctgggaggcagaggttgaggtgagccaagactgcgccactgcactccagcctaggcaacaagagcaaaactctgtctaaaaaaaaagaaaaaaaatccaataaccagtggctcgtgatctcattgactgcataaccaagtcagcagtcctaagagagagatgattttggagttaaatgagattagttaaaccaaagaaggtctgctgattgttgaaatgcccaaacctagtaagtcaactctgagagggaataaaaagaaaaataatgataatagattaaaaaaacaattgaagccatgttaatatatagttgtaaattctcttaatgtaagttcagtggtcattttttctccccttttaaaggtgtttgacaaattttagagtgatactttaagagaatgataaattttaagagacttactgggtgagtagttttatcaaatatttaaaagagttctcttcatttggatcctggttggtatagcctgcaggtaaaaagactgcttaaaggaactggttatattccaatataacacacatacacactatatatatatagtgcccagtatatagtgtatatactatatatacatatattgtgtgtgtgtgtgtgtatatatatatatatatatagtgtgttatgtagtgcatgtgtgggcatatatagtatacatcacacacatatacatcacacactatatacacacatatagtatatgtgatatgtatagtatacatcacacatacactatatacactatatgtgtatatacactatatgtatatagtgtgtgtgtgtgtgtgtgtgtgttatggtggaatataaccagttcctatgtatgtgtttttttggggggaatatgttgtatcaaaataaagtagaaatttaaagagaagtcaacaattggatgaaaatggaaaggagatcacacttctatcatttaaaacaaaacaaaacaacattacacaaaatgatgagctgtaagactgtaaaaatacattgtatctgactaggagtgctaactctgtggaggaaaataagtaagtatagatatcacaagcaaagaattacaatgcagaaaagatattgaagtaatattacaattaaaaaactgaatagtcaaaagagcaataatacaaacatcaaaagctattgtaaacaaaacatgccaggatgagaaactcatgaaaaaaactttttaacataaaaaggagaaatatttggcaacatctaacaaagctataagtatatatcagctatgactaagcaattctacgtctacatacagaatgaccatgaagtctaaaaacagactttaagagagggagatactgaattgccttgattacctattaaatccatccacagtattttcctgtgaaaatcagaaataaaaaaccactttatacatttatttcagtcaaatgatttctcaccagtgtaaattttcggttggcaagtaagatgcccaacaacactaaaggaattcccacactccttacattcatagggtttatcatcagtatgaatgcgctgatgtttggtaaaggatgaactatgtctaaaggccttcccacatgccttgcattcatagggtttttctccagtatgaattctctgatgttctgtaagggctgaactatgtctaaaggccttcccacataccttacattcataaggtttctcaccactatgaattctttgatgttgaataagggctgacgtaagtctaaagaactttccacactccttacattcataaggtttttgaccactgtgaattctttcatgtcgagtaagttcactacctactccaaatgctttctcacattctttacatttatagggtttttcaccagtatgaatcctctgatgtctagtcagggatgaactatttctaaagacctttccacatgctttgcattcatagggtttcttaccagtatgaattctctgatgacgagcaagttctctacatactccaaaagccttcccacattccttacatgcataaggtttctcaccagtgtgaattctctgatgttcaatgagctgtgaactaattctaaaaaccttctcacagtgcatacatttgtagggtttctcaccagtatgaattctctgatgttcggtaagctgtgaatgaaatctgaagtccttgccacattccatacatttgtaagttttctcatcagtatggattttctgatgtcgagtaagttgtgcatgcactctaaaggatttcccacagaatgagcattcaaagtgtttctcaccatcatgaactctttgaagtggagtaacttttccaactctttcaaaggtccttctgtattccttacatttatagaacttctcattatgaattttctggtatacattaaagtctttataaaaactacatgtattcccatattccatatatttacaaggtttcacaccagtatgaatattcagttgtaacatactggagttatctatcccaaaggttttccaacattgattacattcatagttttttccaccagtatgtattttctgatattcatcaaactctaagtcacaactgaagaccttctcatattccttgtattcatagggcttctcactgtcatgagttctccgaggtaaagtaagagattcatgagttttgtaactgggcacattttcagagatgattttcatttgactgaaatatcccacttcaggtccttgtaagtcaatcttgcttttgctttgccagtcatttctgaaaatggaaccttcaaggccacataacttgctactttccattacctcccactgagaaccagtgttttgaataatatcttttcctacagataaatgcttagtctcattcctggactccaaatctgaaagaaaggaaaaaataattttcatgtactacaaaaataaaacagttatagaaagaagagacaatttaagaataattcaccatatacatgaattggttaaaatactgtcatgaaagataaagagagctcacagagtaacagcagaacataaagattatgaggattgtgataaaggtaacagattaagtcagtggatctgaaatttgtgtgttggtcatcacctggtaagctcattggttaaacagaatcaaaatctgtagatgtagaactagtcattagcatcttgtagaggtaatgctaacgcagatcaaaatttgataatccatatatactaacacttttgtggttttcctccccaaaaataaattttaccgaggataataacaaggtgcagtttgttaagacctcattttgcctgggcgtgttggctcatgcctgtaatcctagcactctgggagggcaaggtgggtgggttacctgagctcagaactttgtgaccagtgaaaccctgcctctactaaaatacaaacagctgggcgtgatggcatgcgcctgtagtcccagctacttgggaggctgaggcacaagaattgcttgaacccaggaggtggaggctgcagggagctgagattgcaccactgcactctagcctgggcagcagagcgagagtccgtctcaaaaaaaaccacctcattttaacgcattctcctaatcatttttcatctcctagatcaaaacaaatttcctatcatttagagctatccacaggacatttcatttcacatcaatggtctctttgtatgccagcttcttttctttgttaaagtctcaagataccctcagaaagggcatattagttgaccctaaataacttcatttctgtttctaatcccatatctagtgccttaccctcatatatatttttttcagttgtgtattcaatacttttctcttacaccatttacttccttattccttaaattccacaaggacaaatgtaataaattttcatgtgccaatgtataacaagacctaaggacatagtatatgataattaattagaggaaaagtaaatcactgtatgaatgaatctaaataaaaataaaagtatatatacaaagataagtcactagaaaacaataattatcaaaataattatgtaactataagaataatgccagttaccaatgcctcccaaccctcacattgtattagtgattacatatgtatatttataatacagtaagatacataaatatggcgaacattcatatgtatttattttccaactgcttctccacctacacatattgtccaccactattgcttattccctcttatgcagagccatgattgacatgtggaatgaagaaatacaatcgggatgtgttatttacttctcttcaacagcatatttacatttactccgccgtcctcctaaaaccttcctctattttttcttttatcttcttttacagatattcctttccattttcttatagcaaaagtcaactaatgctgtactttccaaaaatatatttcagatattaaaataatatctgaatataattataactactgttagacttacacagttctgagcaagggcttatgtgtgaaaaggagaatatgctaacagaatcatatgaagaaggtggtctaggtagacaagattggaaggcactttgtagcaaaggattttatggagatcatctggaggccaacagtgagagaagggaatgcctgaggaaaactcagagcaacacataaacactgcatgataaagggcaagaataattttctgtgacttaattatgtataagatgaaataatgcaggcatcaatatctgacgacaacattaaaaccagatttgagtgccagtatcagtaaatcaaaagaagtttcagttagaaataaagaagctctctactaggctgggtgcagtggctgtaacatctgtaatcccagcattttgagaggccaaggtgtgcggatcacttgaggtcagtagtttgagaacagcctggccaacatggcgaaaccccgtctgtactaaaaatacaaaaaaacttagctaggcacggtggcacatgcctgtaatcccagctacttgggaggctgaggcaggagaatcgctcaaacctgggagacggaggttgcagtgagctgagactgcgccaccacactccaggctgggcaacagagtgagactacgtcttaaaaaaaaaagaagctcactattaaataactgttgagtcaatgtggaaatgtaactgaaatcacaaagtttgtagagaaccatgatgttgaaaacatttctaactgacatctatggaacgcaaatacatttgtctcataaaaagtaaaaacttaaatgcttttttttaaaaaagtaaaaataaccaatgtataaagaacagtgacctaaagaaaaggtgaggaattagcaaacaatcactaggtgatgaaaacatacacaaaatgttattaagactcctatgctaataaagctgaaaatgtagactaatgaatgaatttcttggtaaaggaatatttaaaaccaacccaaaaagcaacaatagttggaaaaaaacaaattcctggaatgagataaaatgttcactcactccatgaaacagaaaaatcataaccatgacttattgtccttgttattgaaataaaccagataataagccaggaatcctagaacaaagacctgaatcatgatctggaccaggggaggtatgagatgtaacctgtaatgttttgccagaaagaaaaaagttttacaacagtgggtcacatcaaagggacacaaaaatagtttgcgggagctaaagtgccaccattttgacaatacaagagtcaaatgaggggaaaaaagtttatgtactgaaacatgctaaactaaacaaaaccagaaaaatgcactcatatccaattcaatgctgggtctgggatagggagggtatggaatgagccttggataagctttggacaaaaagtgagaataaattcaaaggttaaaggataaagccaaagcacacagaaatcaccataagaaacatggtatcagtatatcaaaatttcatccaatattcatacagctggacatcaaaaatcagactctggtgggctaatgtatactgaaccaataaaatcaataaacataatgagacttaatagaaggtatgaaaatttctagtgcaccatttgaggtggctacttacttacagtaatataaaagacatataataaaaaaagcctctttgcctttcctactagaattacaaaagtttaccaaagaacatgacagcaactaatatataaaaggaatgacaaattgaaacacactgattccaatgaggacttccaattgcaaaaacattaggtgaaccactgaaaaggaactgtgtatctataaaatgccaaattaagaccacagagattggtttctgaccacactgtctgaattagctctttctccatcacacaccatccctttattcttatacatatcactatatatgttctctacttatctgtttacttgtttattatacatctcaagaactagtatgtcaattccatgagagcagggtctgtattggtcttggtcaccattgtaccgatatctgtctcaatgtagacctgaataaatattgagaatatgaatgagcattttttttggtcaatatatacatacataagtctaaatacaagatgaactggaaaacagttggtggcactgaagatcttaatttcctccaagtgccaggcttttgtttctttttttaaaacaaacaaacaaaacacagtctgggctgggtgcagtggcttacacctgtaatcccaccactttgggaggccaaggcgggcagatcacgaggtcaggagattgagactatcctggctaacacggtgataccccatctctactaaaaatacaaaaaattagccgggcgtggtggcatgcgcctgtagtcccagctactcgggaggctgagacagaatggcatgaacccaggagacagaggttgcagcaagctgaaattgtgccactgcactccagcctgggtgacagagcgagactgtctcaaaaaaatcaataaataaaatcaacaacaacaacaacaacaacatcaaagtaaaaacccacaggcttttgaagggattttcccaacagaatcacaggggctaatctccctcctggaccagataggctttgtgctttggcaatgactttctatcactgattggccatcactcacctggccctgtcttctttcacatcccataaactctatagagcaacttcccttcctccagtaaggtgatcccaattggattagaaatggaagactgcttacaacaaagaaatgtaacaatgttttttttattatagccaatttttaaaatacagctttgagaattggctaaagttttactaaataaaatcaaaattatattgataaagatgtcagaaaagagaaatgtgagggaactggaaaaacattcaccttagagtaaccacagaattatcaagtataaagagactagacaggtaaagaaagctcttatgttatttaaacccatactaattctttgtctggagaagcagtataatagttaaaaaatactgtctttggtgccagattgcctgggtggaaagcctacctctgcaattaagtggctgtgtagccttgcagaagtacctaaatactctctgttgtaagcaacctcttctgtacaacaataatagaaatagcacttatatcacagagttattgtaagaattaaacaagtcctttttttatgagatggagtcttgccctgttgcccaggctggagtgcagtggcgcaatcttggctcactgcaacctctacctcccgagttcaagcgggttccagcaattctcctgcctcagcctcctgagtagctgggactacaggcacatgccaccatgcccagctgatttttttatattttagtagagatggggtttcaccgtgttgcccaggttggtcgcgaactcctgagctcaggcaatccacccaccacctcggcctcccaaagtgctgggattacaggcatgagccaccacgcccagccaagagtcaattatgtaaagtgcttaggatggggccaagtagaaggcaagaactatggaagctgagaggaaagttagtaactttctgagctattaaaaggtccttggtggaatactaatttaatgttaaatgtaaagttctttagccataaagcaggtgggaggaaatgaatatgaactctttatcaatccatcaatatataaattgtagagattcttttaacgattataacaaatcaggacacacagtatgttaaaagttctcccagaaggcaggtaagaatataaagtatttatagcaattctgacctcaaacacaatgtacaggttgtacatgccgaatctacaatctgaaattcagctacaaaatcctaaactttttgagcactgacatgatgctacaagtgaaatacacataactacttaacacaaactttgtttcatgcacaaaactattaaaaacattgtataaaattactttcagtctatgtgtataaagtgtacatgaaacataaatgaattttgtgtttcaatttgggttccatccctaagatgtctcattatgtataagcagatattccaaaatctgaaaaaaaatcccaaatccaaaacactctcatcccaagtattttggataagggatactcaacctgtaatgtctcaatgatatgctatatgtgtcccataagtcaaatccagctccttggtatcaaagaaggtagaaattatatgaagggcctaagaaggtaagaatatcatgaagaatgttaaagactaatggagatgtcatttgcaacacaacaatactgaaagcatgcctttgaaatcagttcacctagtttcttaaaacatagccttgaggacggcgcagtggctcacacctgtaatcccagcactttgggaggccaaggtgggcgaatcacaaggtcaggagttcaagaccagcctggccaacatggtgaaaccctgtctctactaaaaatacaaaaaattagatgggcatagtggcgggctcctgtaattccagctactctggaggctgaggcagaagaatcacttgaacccgggaggcagaggttgcagtgagccaagatcatgtcactgcactccaacctgggtgacagagtgagactccatctcataaacaaaacaaaacatagccttgagttcactgaatatcagttgatagtctagagagtatattctaagttatttaaggcagataaatttacccagtgagagtaagttgctgtagttctccatcatcacatcccagtacaagttcctctgagcagaatccagatattcccattcctcctgagagaagttgatgaccacatccctgagtgtcaccagttcctgaaacaacaaacccgtacattacaggtaaaatttaaggaaatatttttgagaaaaagacaagaggaattgccttatagcaaggggattggacagtaaacaaggaggccaaaagaagactgtgacatgggaagtaaggaaattagtgcttccaaaccagactatcatctttcaagactccctttgatccactgaaatctttctgcatacttatgggatctcttatttagccaaccatgtctggaaattaataaccagtttacaaattaaaagaagtactatatacaagcacatttcatgctatgtgcctgcctcatgaatcatcaataaaggtaagtttctataccgtcattcccctgtacaggagaaaaatatctaactttgaaaatggggtatgaataaaattaaagatttcttgtagctccaagttcattactatgtgacatattatttcacattatataataacaattattacttccagcgataaagttttttttttttttttgagacggagtctcgctctgtcgcccaggccggactgcggactgcagtggcgcaatctcggctcactgcaagctccgcttcccgggttcacgccattctcctgcctcagcctccccagtagctgggactacaggcgcccgccaccgcgcccggctaattttttgtattttttttagtagagacggggtttcacct[140 bp omitted]gttttcttgttaaaaatataatagccttaattatattccaacgtttaggttagagaaggtcttctccaatgctgcgtctacaatcatcatcattttgtatgacttgaggccattcaacatcaaatcaatctacctggaaactcaagtctgtggagaaggtcagagtatgcccaattatcaaacagatccatctgctttttccctatccaagaatatgacaaggaaaagtctagggattcaacttttgctttatatctgctcttgacaaaggactgaacacataggagtgttgaacattctttggggaatagaggcacacaggagggacactgtgctgttagactccagcccttactagaaagcgaagaagtatggggttgtggtacaggttctttgacagaggtgtttggtaggaagaatcagaaaaaggaaatatcacaaagaaaagagaagtagttaacttacatggtccatggttagaactgtaaagaattggtcagggaattccacttctggcatgacagcatgaggagctccatggacatgatccccaatgaaactgtaaaaattattttttaagaaagaaccaccattaaaagtctctggaaatggtgctaggaatgtacagcaaatgaagaaacattagtttaagagaatctcaaaaaacatgttaagaactcttagagtctagactccgtgaaccaaacctgagccctccattgtccattctatcttggtgagaaagactccactccagacaggatagccaagggcatggggcttcttcaccacttctcaacccttgccccagtcagatagctatcttcctaggtggggtaagacatcatcacttttcactctgccccagttacctgttgcgcagctgaagaatgaggactcccttcctctgcctagccccaaaacatgaaatgtaggctttaacttggatgtggtactgctgagcatactgaggtttccaactgttgtgtcctggctcccggggcaagtgttccatgcccaaacaggcaagccaggcagacctggctgctgccccatctgccatctaccaagcactcagctcctaaagcaggggaatcactcagagagatgcacgccattgtccctacctccagcactagaatggtggctctgagattttgtccagggggagaagcaggccatagaacagagagttctgtattgctcctcaaaggaactgaattgacttgcaacagaatgtggagaagtttaaacctaagggcaatgtcaaaaactgaaaattttggtgaagggcaattgagaggaggttgattagagatgtatattatactgtagggtggcttgtttgccagacagaaactgagagacacctgggaagacattctattgtcagaacaaatctcgaacactgacctcaaaaaagccccagtttgattacattagcctgtgaagcaatgtatactccagggcacttatgaaagcaatactgccataagttgcaattagtggtgcttaacagctgggggtggtcagggagatgctcaaagacagccctgtcaaaaccactatcatctaacgctgtctgtaaaagtaggcaaggctgtactcccaatgagcaacatcagagattttacaacatggtgggaatagacttcactaaaataatccagagagtccattctcatgctgctataaggatatacccaagactaggtaatttacaaaggaaagaggcttaattgactcacagttctgcatggctggggaggcctcaggaaacttacaatcatggcagacggcacctcttcacagggtggtaggagacagaatgagagccgagctaagggggaagccccttataaaaccatcagctcctgtgagaactcacccactattacaagaacagtatgggggaaaccacccccatgattcaattatctccacctggtcctgcccttgacatgtggggattattacaattcaaggtgagttttgggtggagatacaagagccaaaccatattacagtcactaagcaggtaaataagcaagtaccaataacaagccctgaggcagagggtgtggacaaaagtactggagttccaacaattgtctataatgtccactttccacaaacaagagacaggcaaagaaacaggaaagtatgattcacacactggaaaagaagcccacaacagaaactgcttgtgagagcaaccagatttaacaggcaaagacttcaaattatacattataatacatattcaggtagacaaaggaaaccataaagaagtaaatgtaggtatgatcataatgttgcatcaaaaagagaatatcaacagagataaaaattattaaaaataaacatatggaaattcttaagttacaaagtataataactgaaatgaaattttcactagaaggactcaatagtagacatgaactggcagaagtattaacaaagttgaagacagattaatagcaatggtataatctgatgaacagagagaaaacaagacaaattaacatctcagagaaatgtgggaccccattaaccacactgatataaacaggagtaccagaagagaggtgagagagaaaaaaaaggatttaaaatttacaaagaaataatggatttgaaattcccaaatttattgaaaaacattaaactgcacatccaggaagctcaacaaacaccaagcaggataaatgcatagagatccaaacatagatgcatcattataaaagcactgaaatccaaagaaagaaatggagaaaatcttgaaagcagtaaaaggaaactgcaggctagaagtgaaactaatacaaaagtattaactgctgatttctcatcagaaaaaaatgaaggccagaaggcagtgggatgatatatacaaagtactcacacacacaaaatccttcaacccagaatcctaaatccatcaacacataaaaaaatgaagtgaccccctacctcacaccacttacaaaaattaactcaaaatggattaaagtcttaaatataaggcctgaaactataaaaatcctagaagaaaacatagtaaagctcttgacattggtcttgcaatgattttttaaaatataacaccaaaagcaccggaaacaaaagcaaaaacaaagaaatgggaccaaataaaattaaaaagcttctacgaaagaaaggaaacaatttaaaaagtgaaatgacattctacagcatgggagaaaatatgtgcaaattatatatctgacaaggggttaatatctaaatatataagaaattcattcaactcaatagcaaaaaaaaaaatccaattaaaaaaataagcaaagaacctgatagacatttttgcaaagaagatatacaaatggtcaacaggtatataaaaaggtgctcaatatcactaaacatcagggaaatgcaaatcaaaaccacaatgaaatatcacctcacacctgataggactgctgttatcaaaaagacaagaaagaaaaaaaatgttgacaaggatatggaaaaaagggaagccttgtacactgtcagggatgtaaattggtacagtccttctgaaaaagaatatagaggctcctcaaaaacttaaaaataggacaaccatacaatccagcaattctgcttctggctatacagccaaaagaaatgaagtcaataactcttttccccctgcaccaagatggagtcttgctctttcacccacggtggagtgcagtgccacaatctcggttcactgcaacctccacctcccgggttcaagcaattctcctgtctcagcctcctgagtagctgggattacaggcatgtggcaccatgcccagctaagttctgtatttttaatagagacggggtttcaccatgttggccaggctggtctcaaactcctgagctcgtgatccacccaccttggcctcccgaagtgccggaattacaggcgtgagccaccacacatggccaagtcagtaacttgaagagatatttgcagtccttttcatggctgcattattcataataaccaaggtatggaaacctaagtgtccatcaatggatggacagataaaagtgtgtttgtatgtgtgtgtatacatatatgtatgtgtcaattatatatcagtaaaacagaggggggtggttatccttatgcagcaaacctatatttcaaaacttaagaacatttcaaaacttaagatgaaaagacatttccagataaaaactgaatttattgctagctgactgaccttaaaaagtactcaaggaagctctttaggctgaaaacaggtgatcccaggcagtaatacaaatccataagaaaaaacaaagagaagtggcctggtgcgttggttcacacctgtaattccagcactttgagaggctgaggcgggaggatcccctgaggttgggagttcgagaccagcctgatcaacgtggaaaaacctggtctctactgaaataaaaaattagccgggtgtggtgatgcatgcctgtaatcccagttactcgggaggctgaggcagaacaatcacatgaacccaggaggcagaggttgcggtgagccgagatcacgccattgtactccagcctgggcaacaagagcgaaactccgtctcaaaaaaaaaaaaaaaaaaaaaaaagagaagcaagccagttttatgtaattataaaagacagtatacatatatatctcttctcctcttaactgatatacaaattttatgaaacgtgtacttatgtatttattgggcccataacatacagaaatgtaatatatttgctaataataacacaaggcaggggaaagcaaagttgtactgggctaaggaaatgaatccagatggtaactcgaatccatctggaccaaatgaggagaacccaaagtgagaaatcagattgataaaataaaagttataaatgtataaaggttctcctttcttctcatttttttttaaaaacatagacttatataaggtaaaaattacaacaacgattggttgagtttgaaacatctgtagatataatgtgaagaccaatattactataagagaagatgaaaggaaataagagttatataggagtaaatttctctatctcacttgaattaagccaatataaatcagaagctgtttctgaagtaagatatttggcagaataaatctctaagcagcaaagtgttcagggtgctgctcggcttctcttaactactcagagtaaaatgtgagaagaaacaatacaaagatgggatttataacacggaagcaaaatatagagatttgaaaattctcagcctaagcatgtaaataaaaaggtatttaggaaagtaaaccaagggtgtgaccaagtgactttctgatcagagtgtggctagaaagaagccaggtgttttcatcatgacaataggagaatgaacccaatggcacttcagagagcttcaaggctgctcctcccatcacaggcccacagtgcgagggccttgaaggcaggatggtttccagggaagggcgtagaacactcatggaactttggggcttgctgcccggggctgcctcaagtctctgctccccacatcccggcacagtgctccttggctgccgtagttgtggctccagtgggcccaggtgcagtttagtccctgctctggagggcaaagtggtgaacctcagcatccacatggtactgattttgcaagtgtgcagagtgcacaagatgtggaagcatggcatccttcaaagagatttctttttttttttttttttgagacagactctcactgtattgcccaagctggagtgcagtggtgcgatcttggctcactgcaacctccgcctccccggctcaagcaattcttttgtctcagcctcccaaatagctgggattacaggcacgtgatgccttggagagcctcagggcctagacagagacctactacagaggcagagccactgcagacagtcccccctagggcattgtccagtggagtcatacaggctgtgccactccccaaaccctagacctgtagagccagcagcatgcaacatgggcctgggagagagccagtggcacctgactgcaacctatgagagctgcagtatgaactgtgcacaccaaagccatggtggcagggacccttcgggcctttggggtccaacccccatcccagtgtgtctggaacatgcgacaaggagtcaaagatgattattctccaggctaaaggtttattgttgtttgccctgttcagttttggacctacttgagaccagtgacccatactttcttatttatctgttttggaatagaaatgtctgtcctggccgggtgcagtggctcatgcctataatcccagcactctgggaggccaaggcaggtggatcatctgaggtggggagttcaagaccagcctgaccaacatggagaaaccccatctctactaaaaatacaaaaaaattagccaggaatggtggtgcatgcctgtaatcccagctactcgggaggctgaggtaggagaatcgcttgaacctgggaggcggaggttgcggtgagccgagatcgcaccattgcactgcagcccaggggaaaaaaaaaaagaaatgtctgccttattccattattattccattgtagcttggaagcacgtaactagtttggtttcacaggtacaggactagagagcaatttgcctcaggatgaatcacatgatttagataatacctagatgagactctgccctttaagttgactttaaagtttatgctgaaatgagttttaatactttgggggctattggagtgaaatgaatgtattttgtacatgagaaagacatgaatatagggggggtccaggggcagaatgtaacatgtcctctccaaaattcaggtgttgccaatgtgatagtattagaaggtggagcctggccgggcgcggtggctcatgcctgtaatcctagcactttgggaggccgaggtgggcggatcacgaggtcaggaaatcgagaccatcctggctaacagggtgaaaccccgtctctactaaaaaactacaaaaaaatagccgggcgtggtggcaggtgcctgtagtcccagctactcaggaggctgaggcaggagaatggcaggaacctgggaggcggagcttgcagtgagctgagattgtgccctccagcctgggcgacagagcaacactctgtctccagaaaaaaaaaaaaaaaaagaaggtggagcctttaagaggtgatgaggggctcctccctttgtgaatgggattacagccttcataaaagaggctcaatgcagacttccttgtcctcccttttgcacgtgaggacacacgtcctttctggaggatgcagcatcaaggcacccttggaagaggacatttgaacctgatgatgccttgatcttggacttcataaactacagaactgtgatacatttctgttctttataaatcaggtat[139 bp omitted]acagtgaaaccctgtctatactaaaaatacaccaaaaattagccaggcatggtggtgtgcgcctctaatcctagctactcgggaggctgaggcaggaaaatcgcgtgaacccaggaggcggaggttgcagtaagccgagatcacaccacagcactccagcctgggcaacagaatgagattgtgtctcaaaaaaaaaaaaaagttgtctatgggtgactcagctgcaaagctgcaaggagattgagagtaagacgatggaaaaaacggtcaagccgagaaccaaatcaggaacacaatcccatttacaattgccactaaaagaataacatacctaagaatacagctaaccagggaggtgaaagatctctacaatgagaaccacaaaacactgctcaaagaaatcagatgacacaaatggaaaaacatggtaggaagaatcaatatcattaaaatggccatactgcccaaggcaatttatagattcaatgctattcctatcaaactaccaaggacattcttcacagaactagaaaaagctattttaaaattcacatggaaccaaaaaagggtctgaatagccaaggtaatcctaagcaaaaagaacaatgctggttacatcacactacctgacttcaagctatactacaaggctacagtaaccaaaacgcaatggtttggaaacagacacacagaccaatggaatagaatagaggacctagaaagtcacacacctacaaccaactgatctttgacaaagtcaacaaaaataagcaatgaggaaaggactccctattcaataaatggtgctgggatgactggcatatgcagaagaatgaaactgcacccgtacttttcaacatatacaaaaattaactcaagtttgatgaaagcttaaatgtaagaactaaaactaaaaatcctagaagaaaacctaggaaatacccttgtaaacatcagccttgacaaataatttgtgactaattcctcaaaagcaactgaaacaaaacaaaaattgacaagtgagacctaactaaagagcttccgctcagcaaaagaaattatcaacagagtaaacaacaacctacagaatgggagaaaatattcacaaactatgcatttaacaaaggtctaatatccagaatctacaaggaatttaaacaattcaacaagcagaaaacagtcccactaaaagtgggtaaaggatatgaacagacccttctcaaaagacatacaagcagccaacaaacatacttttttaaatgccccacaccactaatcatcagagaaatgcaaatcaaaaccacaatgagttagccatctcatatcagtcagaacaattattgttaaatagtcaaaagtaacagatgttggtgaggctgcggagaaaagggaatgcttacacactgttggtgggagtgtaaattagtttagccactgtgggatgcagtttggagatttctcaaataactaaaaatagaacaaccatttgactcagcaatcccattattgggtacatacccaaaagaaaataaatcattttacaaaaaagacacatgcactcatgttcatcacagcactattcacaatagcaaagacacagaatcaacctaggtgcccctcaacagtggcttggataaagaaaatgtggtatacatatgtcatggaataccatacataaaaaagaacaaaatcatgtcctttgaagcaacatggatgcagctggaggccattattctaaaagcattaatgcagaaaaagaaaatcaaatactgcatgttctcactgctaagtgggagctaaacactgggtacaaatagacataaatatgggaacaatacacactgcgactactagaggcgggagggagggagagaaacaagagttgaaaaactattgggtactaggttcactatctggaagacaagatcaattgtactccaaatctcagcatcatgcaatatactcatgttaaccaacctgcaaatgtaccccctgaatcgaaaataaaagttgaaaaaagaaaccaaaaacacaatgaaggagaaactaaaacatacccaagtaaacaaaaactgagggacctcattcgaagacatgccataatagaaaagctaagggagccctgcaagttggaataaaaagacagtagaaagtaactcaaagccatatacaaaaatgaagaacaggccgggcgcggtggctcacacctgtaatcccagcattttgggaggccaaggcaggcggatcatgaggtcaggagttcgagacaagcctggccaacatggtgaaaccccatctctactaaaaatacaaaaattagctgggaatggtggcacatgcctataatcccagctacttgggaggctgatgtaggagaattgcttgaccccagaggcggaggttgcagtgagcagagattgtgccaccgctctcatgcctgggcgacagagtgagactctgtctcaaaaaaaagaaagaaaagaaaacaacgataaaggtacctaaataggcaaatacaaaagtctattgcatcttgggcttgcaggtcctctttatttccccaatatgatttaaaagactaacgtgtaaaacagtcattataaaccaatgttaaagagcacacaatgtataaaaatgtaatctgtgacaaaacaacatgaagaggagcagaactgtataggaacagagttttggatatagtattaaagctaaggagtatgcagcacagttttgattcaacaggtctggaattttgtttgtttgagacagggtctcactcttttgccccggctggagtgcagtagtgtctggaatgtttaaaccctgcctattccaaagaaagttgtagcccttgactaacacctagaagataaattctggccccggaatagccagctttcattaattttaatgtgatcctttcactagtgggaaaacaacaacaacaacacttttctgagttgtgtgagtccatctagcagtcagtgaacctgaaagtggtcttggagttccatgaccaaagtctataaattcaaaccagttatttgtaaatgtaaaatattcactgtaatcttcagaacacatgctaagaaaacaatcagcttatataaaagaaatgacaagggaattaaaatggtacagtacaataagttaattaaaaccaaaagaaagccaggtgtagtggctcataccacttatcccaacacttttgggaagctgaggcaggcagatcgcttgagcccaggagttcaagaccagcttggccaacatggtgaaaccttgtctctaccaaaaatacaaaaaattagccaggcatggtggtgctcacctgtggtcctagctgttggggaggtggggggcgggggtgtgtgagggctggggctggggtaggaggatcacttgagcccaggcagttgaggctgcagtgagttgcgattgcaccactgaactccagcctgggtgatggaatgataccttgtctcaaaaaaataataaaaaaaagggccaggcctggtggcttatgcctgtaatcccagcactttgggaggccaagacaggtacatcacctgaggtcgggagtttcagaccagcccggccaatatggtaaaatcccatctctactaaaaatacaaaaattagcctggtgtggtggcaggcacctgtagtctcagctacttgggaggctaaggcaggagaagcgctggaaggaggcagaggttgcagtgagccgagatcgcgccactgcattccagcctgggcaacagagcgagactgtctccaaaaaaaaaaaaaaattcatatgacattgcaacagattcagccaaaacaaagctggaagactgatatttcccaattcagaactgactataaaaccacaataatcaagactgtggggcacggaatatggatagatatattcatcaatggaatagaactgagtgaaaatttaaaccagtgtagctagggtcaagtgatttttgacaagggtgccaatctaatgaaatagaggaaagaacagtcttttcaacaaatggtgccagaaaaattgaatatccacatgcaaaagaatgaaattgcatcactccttaataacacataaaaaaagtaactgaaaacagatcaatgacccaaatataagagctaaaactataaaactcttagaaggaaatgtaggggtaagtcatcatgaacttatatttggcaatggattcttttttttttgagatggagtctcactctgtcacccagagtggggtgcagtggcgccatctcggctcactgcaacctccacctcccaggttcaagtgattctcctgcctcagcctcctcctgagtagctgggattacaggtgcctgccaccatgcctggctaatttttgtatttttagtaggagacggggtttcaccatgctggccaggctggtttcaaactcctgacctcaagtgatccacccatatctgcctcccaaagtgctgggattacagtctgagccactgcatctggcctatatttggcaatggattcttaaatgatgacaccaaaaggataagcagcaaaagaaaattttgatgaattaggatgtatcaaaactaaaagcttttgtgcatcaaaaaatcattatagaagaaactgataagacagcctgcacgatgtgaaaaaatatctgcaaatcatatatctcatgagcatttaacatccagaatatataaaaactcctacaactcagcccaacaaaaagacaaacagcccaagttaaaagctggcaaaagacttcagtagacatttcttcataaaagatgaacaaatggtcaacaagtacatggaaagatgctgaaaatcattagacaataggaaaataataacagaaccatgagaataacatcagcaagatggcagctgaggaagcttcaattccctattctctattgaaacacttaaaaaacaactagagactagctaaaatatctttgtaagggtctggaaatcactcaaagactgtaactatcaaacaaatgcccagtcaggagaaagtcacattcaaaatggtagtgaatttgttgattatgttacttgtgctcttactccatctctagtgcagcatggaagaagcagcccagttcccatttccctccttcaggccagaaggaacaaagcagagcttatttggaacatgctaatctgtctgtgggctccttgaggtactgaggtactggtttctgttttatctgattttctttcttttttttttttttttacacagagtctcactttgtcatctaggctggagtgcagtggcatgatctcggctcactgcaacctctgcctcccaggttcaagcaattctcctgcctcagcctcctgtgcagctgggattacaggtgcacaccaccacgcctggcaaatttttgtacttttaatagagacagggtttcactatgttggccaggctggtctcgaagtcctaacctcaagtgatctgcctgccttggcctcccaaagtgctgggattacaggtgtgagccactctgacttttgagtttcaacatgtaaaaggctgcacagctcagatctcaggcaggtaaaggccacaaaggacagtggtgggcactgtggtgcatcaaagctaaaacactattaaaactagaaataagtgcagcagcactgcaggatataagatcagtatgcaaaactcaatgatattttaattgcctggacacctgtggatacttggagcaaacgattacaggtggaaaaatataacatctagggcctaagaagcaagggtgagaccctatgaaattaaggcatttgaaagcagctatgcatattagggaaactggtaaaagcatatacacaggtataggcacaggcatgctacagacccaggaaaaacgtaagaccttagactttcaccctgagatgatcccaaggccctaattagtgaagatctccaacggtctgcaaaaattaggagaagtagctgtttcttcaaatgcccagttttcaacaaaagactgcaaggcatacaaagacacaggaaaacagggtccaatcaaaggagcaaaataaattacacttgaagaaacaaaagcattggagtaactagaaaaaggctttgtaaaaactgtcttaaatatgctcatagagctaaaggaaaacagagaaagaactaaaaaggaaatcacgaaaatgacatataaataagtgagatatcaacaaagagaaataattactttttaaaaaactggctgggtgtggtggctcatgcctgtaatcccagcacttagagaggctgaggcgggcaaacaacacgaggccaggatttccagactagtctagccaacatggtaaaaccctgtctctactaaaaaaaaaaaaaatttagctgagtgcagtggtgcacacctgtagtcccagctactcaggaggctgaggcatgagaattgcttgagcctgggaggcacagaggttgcagtgagtcaagatcacacaactgcactccagcctgggtgacagggcaagactcttgttgcaaaacaaaaagaaaaagaaaaaaatgaagaattggctcagagtgctcaaaccctgcacattccaaagaagaaattgtccttgaccagctcctgggagataatctctgagcagttagagtatcctgcctgattaacagagtctatgtatatctgaggtcttagccatgccagatggcttttgttaacaatgtggtttatggtaaatacctgtatccatctgacttctgggtaggcttgactaagtaggtaaggtcagtgcacagaaccttcatgcccacatgactgatcgtcaataaaaaccccggacatgggccagggcagtagctcacacctgtaattccaacactttgggaggcagaggcaggtggatcacttaagcccaggagttcaagatcagcttgggcaacatggcaaaaccccatctatacaaataatacaaaaattagccgggtgttgtggtgtgtgcctgtagtcctagctacttgggagactgaggtgggaggatcccttgaggctgggaagtagaggctgcattgagctgtgaccccaccactgcatttcagcctgggtgagagagcaagaccctatctcaaaaaaaaaaaaaaaaaaaaagaaaagaaaaaagaaaaaagaaaacaaagcaaaacaaaaaaccctggaaaccatggcttaggagagcttccctggttggccacgcttcatgtttgtattcgcacattgttgctgggagaattaggtgctgcctgtgcaactgcactggaagcttgcacctggtttctcccggtatttgccctatgcaacttttccctttgctgattttaatgtgtaccttttcattgtaatgaagaataactatgagcataacagcttttctgagttctgtgagtccttctcgcaaatcattgaacctaagacagtcaaattgccttaatagaacatttgcaaatctggcttttaaaaaattcatttcaagtgcccatcaaaattaactttatattttcattgctcttgatttacagaaaatgtatggggaatactaagaatcttcacaaaccagctttttttcttcccttgcagataaggacttaaagtgccaggcctttattaaattctctaggtttatgtccatattaatgtatccaggcctcataaagaccctaaagcactgatataattattgtttacattctacaacaagaaactgtaaagcggaaaaatgagtaactattaacccctttgaaatgcagtgtgaacatataactgaattttaaatttttttcacttttcctaagctaattaacacaggattacctttaattttaattaacttacatttaaatacaaaagcaatataaatgtttttctattaaacacaactttattgttttggtaggactataattcaccctaaacactgaaaatttagcatccaaattgagacatgcaataacaataaaacatataccagattttgaaaacttggtataaagatatgagtgtaaagtatttcagtgtattcatatcattacatgttgaaataatattttggatatattggtttaaataaaatacattaccaaaatt[135 bp omitted]acatgatgaaaccccttctctactaaaaattcaaaaattagccgggcatggtggcgggcgcctgtaatcccagctacttgggaggctgaggcaggagactcacttgaacctgggaggcagaggttgcagtgaactgagatcgcaccattgcgctccagcctgggcaataacagtgaaactctgtctcaaaaaaaaaaaaaaaagtgtctaatggaaatttttaaattacctaagtggctttatattatatttgcattagactgtgctgctttagactcagacaccactgtatcaggctgcctctcacaatctacaccaatgtcacactgccaaatctcaaagaagatttggttgtcaccacttaaatcccctcatgaatgttctggaaaaactccctgcccttgttgacatagcctctctgcataaaactcctatcatattcccactcctaaatgtctccaaagccaactttgtcacttactgattaatacctaccatctcctatcttgctttgtttgcaaatcaagtctgtaaataagatcaaaggtatctagtgtgccattctacttaatcactcgtctcctccttaacaaattacattctaaaaaaaagttttaacttctcctccaggagttgtatttctataccataaaaatcctttggaaaaaaagaagcacatgggagaattgaatgatttacctaatgcatatgtgaatattcaatgaaagggaaatgggcatttggaaaggcaatggaggacaaggggacccatctctacggtcctgttgttaattgggaagagaaaaccaagggaccaggtaaatgaacaaaaaaaaaaactaaccttgagttggccattagtaccaatgctgtcttccacttcagggggccttcacttgcagaactacataaccaagagggagaaaggactcatgacatcctggactggttaaataagaacacagtgttcaccaccagaaaagcccatcacacacaacaaacacacccagatcgaagagggaaactagaatactgtcgactcctccccacatccgagaaaaaggtacgaccaatgcctagcagtttctagggaacacagctcaggaaatactgtagttctttaatgtataaatggcctccaaactcatgcaaggggagttatcccaggaatgaatactacacctatgccctccccttcacgtcttcccaggaaacttcatttatctatcttatctatctatctatctatctatctattatctatcatttatctatcttctatatatcatctatgtaatctatctatatgcgtgtgtgtgtgtgtataagacctcacgaagagattccatcacagacatcacagagtcggaaaaatgacgctttacccaaaacaaactcctacaggctcacggaaaaaaacgaacaaacaaacaaacaaaaaaaaacaaaaaaacacttctaccccgttcacacttatagttggtcacaacagtgctgtcacacgatcacgtcaccgtagaccagggtcacacgatagaccccgcccctactcaccgtcctgagtccgatcaaacagcacccacggcacacactagggtctccgtctctcacacacacacaccacaatgacgtcgtaaacaatagcactaaccaccatcgtccgcagctcccgcgtacagaggcctcaggctcccggctccacgtggaccgacctcgcccggcagcgcggggccacctcaccgcgagctcctcccgcagcccggcccgggtcacctcgactcgccaggcttaactcaataaccacaacaccggaaaaggaagcaaaggtcgaagttcatccgcggccctgaggcctgtgggaaacgtagtccaacaacgaaagagccctgaagctcaagcggagcccgctggccgcaggggccgcaccacgccccagaccctggagtttccgggtgcgcagacccttgccatcagcagaggctgccgctgcgcgtcccctaggcgcggaagaggcggctggtggtccctgacggcaaggtgaagtcgaggcagtaatcgggaacccaggttgggaggacagaatggggaacaggaagctggggcgagggtggtcttgggggaggtggggggccgcggaattctaggtggcccctgcctcacctctggaaagaaccggaagcccgggccggggagggtgaagggagtcgcggacccggctgctcagccgaggaggaaacccggaccccaggctgagggaggccgaagaaggaactggagggccgggctgggaaggcctgaagcgggtacagcctttaggctggggagggtcgaggggagaactcggagcctgagtcgggcgaggttttgctccactctggcttctaagtgtgggggcctcaggatgtgacccgtggtcgtaaacctgagggtgacttggagtttttgtccgttttgcaccatgagaaaggccccagatggaatctggcaggtagcggcggttcagtgtgtgtgtgtctgccttagggcgtgttttacactgttgacgaaaagactcagactctaaagtatttgaagagacttattctgagctaaatatgagtgaccaatggccggtggcccagccctcaggagatcttgagaacctgtgcccagggtggacgggatatatgtggttttataccttttagggaaacatgagacaccaatcaaatacatgtaaaatgtacattgattccctccggaaaggcgggacagctggaaggtggctggccttccaggtcataggtagattcaaagattatttgattggcaatgggttgaaagagttattgacgtaagacttaggaatgtctccaggtagcacgcttcacagagaatagattgtaaatgtttcttttcagacttggggtcttttctatcagtaattccaaaatggaggagggtataatgaagcatgtccgacccgcccacccccgcctttccatcatggctttactagtttttcaggttaggaatgccctggccaagaggaggggtccattcaagatggtctgggtgtgcttaggattttatttttggtttacaacaccagcaccaccggagtttgctggtgtcctttccagtcagtttcaaagcagagacagccatagttctgatttgtgtcactgtaactgtcagttccggaattccatatttctcctttagtttaccctaatgtgtgtgagatttcatgtgtagttcatttttctttttctgaacagcactccattgtgcaaatataccacaatttgtgtagtcatttttctgttgttgaacatttggcatatttacaggttttatacattacgaataaagctggcacgtttccatttctcctgggcaaatatttagaagaaaagttgctgggtaattggtaagtttacatttaactttccaagaagctgataagccttttagaatgattagttgtgatttgtgtgtgtgagattgtgtaactggagtaagtagtttctgagtttgctttgctatgtttgtatggaattataagatgggctcaacagggttgtgaatgtcatgtaggatccataggattgtggctttgtggagtaggtaagatcacaggaaactgaatgtgtctgtgctaattgttatttatcatggttttgtgtgtacattccatgataactgaaaatggatcactatgtaagtgatgttaatgactgaagaactctgtgtgtctggtgtatttcattttgcttgcagaattatgacagtttctaataactaaaatatcacaagcattggaaactaggaggtaaaattataatttctagatgacagggttgcattacctggaaacatcatacaaactaaatccaatatgttgaaatgaggactccatatgtagcacagaagtaaaatactttcatccctaccactttgaatagttatatagatttgaggtcccctcccacccatccccccgcctcctgcttgcccctggatgaagttgagggtgatttaatgccctcctaaatcactttaagccaagtaaaagtacttgaaatactaaaaatcacaaagtcagctttgtagtaattaaaatagtcattttctaattaaaatatttactgtaaaaatcaaatttcaaacttcatttaaaagaaaaatttctttcaactgtctagagcctacagtgtaattactttcttctctacttccccaaccggtattactaaataggtactatctcgcataatgattaggatttaatagtaaatgcttattagttaaccaggcaggtttaaccacgttattatagaaactctaagaggtttcacatgtgttttttttttgttttgttttgtttgtttgttttgagatggagtctcgctctgtcacccaggtgggagtgcaatggcgtcgtcttggctccctgcgacctctgcctcccgggttcaagcagttatcctgcctcaacctcccaagtagctgggattacaggcacccgccaccacacccggctaatttttgtatttttagtagagatggggtttcacca[136 bp omitted]ccttttgaaaaaaagaatccaaaagagcaagggtcctttcctgcaaattataaaagctatggctgagaatgaatgtttcttctctcctttctgaaatatctttcccccaggataactgagcatttgcctaccatgaaacttccatgagacaggattctccattttcttttattctagtcagataacgatgttgccttctccaagtttcccttctaattgtaactactgttcacttaataattggatattttggccgggcgcggtggctcacgcctgtaatcccaacactttgggaggctgaggcaggtggatcacgaggtcaggagttcaagaccagcctggccaacatagtgaaaccctgtctctactaaaaatacaaaaattatccaggcgtagtggcccgcacctgtagtcccagctactcgggaggctgaggcaggagaattgcttgaacccaggaagcggcgtttgcagtgagccaagatcgtgccattgtactccatcctgggctacaaagcaagactccgtctcaaaataataataataataataataataattggctatatcactcagcactccttttcactcctataaacagaaacatattcccttgaattaaataagcatatgttcctttcataaaccttttttatacagatagtgatttgatgtctatgtagtgagtactcaggagagcccatacaagggaaagcctcatcatgtccacatatctcagtttactagtgagtgattctactttttcttttttcttttttttttttttttgagacagggtctttgtcacccaggctggggggcagtggcacaatcttggctcactgcagcctcgacctcttaggctcaagtgactctcccatttcagtctcctgagtagctgggaccacaggcacccactactatacctggctaatttttgtattttgtattttaggtggagacaaggtttcgccacattgactgggctggtctggaactcctgagctcaagcaaccggccctccttgacctcccaaagtgctaggattacaggtgtgaaccaccgtgcccggccctactttctatcgaagtagaataggtagatcacattattattaacagtatatgggaagagggaggtcctcccatgttacattgttctcccttcaccttctgggtcatgttgcaccactgtttcccttctagtcatatcccagggggccttgtcccatttatacagctctattctagtggtcaccagaggaatgggagtaatctgattgaaagataagacagaagattgtactctcttttttttttttttgagacagagtcacccaggctggaatgcagtggcattgtcatggctcaccgcagtctcaaactcctgggcccaagtgatcctcccactcagcctcctgagtagctgggactagaggcacatgcaaccacatgcagctatttttttttaaattttctgtagagacagggtctcactgtgttgctcagtttgtctcaaactcctgggctcaagtgatcctcctgccttggcctcacaaagtactaggattacaggcatgagtcaccacactcagctgaactctactctttatgttcaggaaagcactggagaagagagaggacaagagaaacaggtccgtagtgacaggagcctaggaatagagcaggccttcagtcttggtgaaaaaataaatggtattctaagccttcctttggacattaattcagtactacccactctttttctcttgtccattcctcccttatattttttttataaaatgaagaactcaatcccttattttttttttctatccttcaagtgaagggcaagaacaaagagtgtgggggagattttttttttttttttttttttgagacggagtcttaactctgtcacccaggctggagtgcagtggtgctatctcggctcactgcaacctccgcctcccaggttcaagcgatcctcctgcctcagcctcccaagtagctgggactacaggcctgcgccaccgcacgcagctaattttttgtatttttagtagagacgaggtttcaacatgttggacaggatggtcttgatctcttttttttttttttttttttttttttttttttgagacggagtctcactctgttgcccaggctggagtgcagtggcgtgatctcagctcactgcaagctccgcctcccgggttcacgctattctcctgcctcagcctcccgagtagctgggactataggtgcccgccacgatgcccggctaattttttgtatttttagtagagatggggtttcaccgtgttagccaggatggtctcgatctcctgaccttgtgatccccccgcctcagcctccaaaagtgctaggattataggcatgagccactgcactccactgggggagaatttttttttttttgagatgaagtgttgctctgttgcccacgctggagtacagtggtgcgatcttggcttactgcaacttctgtctcccgggttcaagcatttctgctgcctcagcctccctggtagctgggattatgccaccacacttggctgatttttgtgtttttagtacagatggtttcgccat[139 bp omitted]ctcatgcctataatcccagcacttggggaggccgaggcgggtggatcacctgctgaggtcaggagttcgagaccagcctggccaacatggtgaaaacctgtctctactaaaaattagccaggcatggtcgtgggtgcctgtaatcccagctactcgggaggctgaggcagagaattgcttgaacccggtaggtggaggttgtagtgagccaagattgcgccgttgcactccagcctgggagacagagtgagactccgtctaaaaaaaaaaaaaatactacacgtgtgaattagaaattctaagctgagaaagctacttaaaattggtcaagaaaaagatacacattaagtataagaaagttggcatggctatagtagtatcagataataggcctcaaaacagtgtatatggcaggagataggtaacagtcataaaagagcaggtcattaggaatttgcatatacatttgtcactacagggatacattctgagaaatgtgttattaggtgattgcatcatgcaagcatcatagagcacactaacacaaacagcaatggggtagcctactacatacctaagttatatggtatagcctattgctcctaggctacaaacctgtatagcatattatatagcatatagcatacctgtattgaatgctgtaggcatttataacacagtggtgtttgtgtatctaaacatagcaaaggtacagtaaaaatactgtataaaatattaaaaaatggcacaccggtataagatacttgccatgaatggagcttgtgggactgaatttctgggtgcatcagtgagtgagttgtgagagaatgctaaggactaggacattactgtatactgctgtagactttacaagcagtacacttaggcttcactaaatttatttttttaagttttcttcaataataaattaaccttagcttcctgtaatatttttacattataaacttactattttttatctttctgaattgtagtgactcttcacttaaaacgcaaacacattatatagcaacacaaaaatatttctgtccttattctataggcttttttctatttaaaaatttttttgttttaaaaatgtttgttactttttaaactttcttgttaaaaacaaacacactttagcctgggcctacacagggtctagagtatcaatatgtctgtcttttaccgccatatcttgtccaactggaatgtcgtcttcaggattaaaaatatgcatggagctgtcatcgcctatgaaaacaatgccttcttctggatacctcctgaaggacttgcctgaggctgttttacagttactttttttttttaataagtagaaggagtacagtctaaaataataatacaaatagtacaataaattacataaactagtaatgtaatcacttattattatcacctattacgtactatacataattgcatgtgctatacttttatacaactggaagcacagtaggtttatttacagcagcgtcaccacaaacacctgagtgatatgttgcatgacaacgtccacaagtgataggaatttttcagctccattgtaatcttatgggaccaccattgtatatgtgtccatcattgagtaaaatgttattacatgacacatgactgtgttcatcaggaatatgtatgctagtatgaacctataatgagagtgttaaattttatgaagcaaaaactaacagaacaaaagaaatagatccacaagcataattggaaatccacaattatatctcagtaattgatagcacttgtaggcaagaaattcagtagtatatgtaatcagctcttcatatatgcagattcaaccaatagcaatgcacaaatattcagaaaaaacacaatgacagtaaaaaaatacaaattttaaaatacagtataaaattatttacatagcatttacattgtattaagtattataaaaaatctagagatggtttaaaatatacagaaggttgtgcataggttatatgcaactactacaccattttatataacaaacttgggcatctgtaggttttggtatccacaaggtgtcctggaaccagtcccctgtggatagcaagggacaactgtatagaagatatgaaccacaccagtcaacatgacctaattgttgtttacagaacaccatacccacaattgaaaaattacattcttttcatgtacctgaacagtccccatgatagactattggctggaccataagtcacaataaacttcaaaagattgccacattacagggaatgtgcattagaaaccaataataagaaacctatacagtccttcaatacatggaaattaaataacacacttctagatctacagatcattgaataaataaggggaaaatgttttgaaatatgaaaaagtgacaacagcatatcaaaattggaaggatacagctaaagcagagttgagaggaatgttaagtacttaaataaaaaaaggagaaattcatagcagcattattcacaataaccaagaaatacgtacaacccagatgttcatcagtggatgaatggataaacaaaatgtggtaatatgatttggatatttgttccctcaaaatctcacacggacatgtgacccccagtgttggaggtggcgcctagtgggaggtgttggattatggggtggatctcatgaatggcttggtgtcctccacatggatatgagttcatcctatagctagttgtttaaaagagcctggcacctcctccctctcccttttgttccctcttgccatgtgatatgctagctctccctttgccttctgccataattgtaagcttcctgaggcctcaccagaagcagatgctggcactatgcttcttgtacagcctatagaaccataagctaaataaaccatttttctttataaattacccagcctcaggtattcctttatagcaacacaaaacagactaatacatgtggcatatacatacaatgtaatattattcagccttggaaggaaattttgacatatgctacaatgtggctgaaccttgaggatattctaataagccaatcacaaaaagataactacttatgattccactcatatgaagtatctagagtagtccacctcataaaatcagaaagtattactggtctcccacttttaggctattaacgcttgtagtgagagtttgtaggtttcttgtcgtggttgccaggggctgggggcagggggaaaagggtagttattatttcatggatatagtttcacatttacaggatgaaaaagttgtggatgttggttgtacaaaaatgggaatatacttaatgctgctgagctgtatactcaaatagttaagatggtaaattttatgttacatgtatactttgccaccatttttaaaaatgaggaaaggcttaaacaagaataataaacatgctatatgc[171 bp omitted]aaaattagccaggagttgtggcaggcgccgcctgtagtcccagctactcgggaggctgaggcaggagaatggcctaaatccgggaggaggagcttgcagtgagccgagatcgcgccactgcactccaggctgggtgacagagcgagactccatcttaaaaaaaaaaaaaaaaaaaagatgagcataaatcaattaagtagaaatagaaagcagaccattaagaaaatgaacaaaacaacaagtttatgtgaaggtattttaaaaatggataaatccctagtaagcataattaataaaatagaaaacacaaattgcccatgtcaggaataaaaatgaagatgccactacggatcctatagacagtaaaatgataaggcaatattatgaacaattttatgccaataaatttgacattttagatgaaattcatccattcctttaaaagcacagcttctcaaaactcttgactcaaaatgaaatagaaaaacagaaagtctgtatctaattgtttgtttgtttgtttgtttggagacagggtcttgctttgtcagactggaggctagtggcatgatcatgactcactacagcctcaacctaccagtatcaagtgattcttctgtctcagcctcccaagtagctgggagtacaggtgggcaccactatggccagctaattaaaaaaaaaatttagagacagggtctcactttgttgtgcaggctggtcttgaactcctgggctcaagaaatcctcccaccttggcctcccaaagtgctgagatttcaggcatgtgccatgacacctggcctaaaattttaagttttaataaataaaaatccatacatacagaaccaggttcagctccactgaaacccctgcaactcagccaaaagtaaatgtaacatggttttgaatgctgtcttaatccagggcacatgaaaaacccttaaaaacaaaaacaaaaacaaagcatacctctgccccaccgagatgagctcaaaaacaaacattacaaacaacgaggaaataaccatcacaggagggtcagcagagtaaataaataataaagttggcacctacaagaactgcatataatatgacaatatgaaagaatatgaaatgttttaaatggaaaaaaactcataatgaaagcataatacttaaaaagaatcagtagatttaaaaaataaccagagaaaatttctagaaataaaaaagatcttaagtatagagaacataacaagcacagctcaaaattaatgaacttaaagatatatctgaagagattacctataatgcagcacagagataaaaagtgaaatacagatgagaaactgagacatggaagaaaataaaagggcccaagacacatctaataaatgtcataaaaggagaaaaaggaggagaagcatcagaagaaaaagtggtttacaacttttcaaaattaaactcaattttaagatgaggaatcaaaatgagtgtcaagtaggataatgaaagtggatctaacacctagacacatcacagtgataatgcaaaacagaaatcttgaaaagaaggaagggagggaaggaaagaaaagaaaaacagaaaagacatgctacctaaaaggaaagatgattgggcacaagatgtcagaagacaggagaataataccttcaaactgatagaggaaaagtagcaattaagagtggggcaaaataaagacattttcagacaaagataaggtttttttcatagactcactggaagaatttctaaaggatgtgaatcagcaaaaagaaaaacccagaaagacagaatgagataaaattttaaatgatgagcaaggaaattggtaaatatgttggggattctgtttactaagtaatgatgattactttttacggaatttcaaaacaaattagatcaaaagcaccagacaaaaatagaaagaggccggatgcggtagttcacacctgtaatcccagcactttgggaggccaagatgggcagatcacttgaggtcaggagttggagaccagcctggccaacatgctgaaaccccattttcactaaaaatacaaaaatcagctgggtgtggtggcgctcacctgtgatcccaactactcaggaggctaaggcaagataatcgcttgaacccaggaggtggtggttgcagtgaaccgagattgccccactgcactccaccctgggtaacagagggagactctgtctcaaaaaaaaaaaaaaagaaagaatgtacctacagcattctaaggtcttttttattgctcaagaaggagataccaattagtcattaagtcaaagatgcaaggttaagagtaacttccgatagtaaagcaatacaatatcttatttttaatccagtgcaggggaaagtagaataaggagcacttaattgatctcatagaagtcaataaaacataaaagaagcagcaagtataagcctgattaaacagaaagtggggaaagagatgggtcattgagctaaggggaggcctggtgacagctcttggaagatgaagtctgaccagaatagcacataagtcaatcaggttgctgtggccaaagtgcatcgtccttgcctctctgagtttgtagtggggagaaacaacaaacccaacactaaacatggaggaaagaattaaagactcaggcctatcagtttccactccctgccctcccgttactaccagtttaaaggcttacaggggctcatggatgagtgggaagtttttgtgacgtttgatagagaaatgagctgcctcttgaccagcagagagccccaggttcatcctcatgtggagtaacagggctgcagagcagtcagtgttccagagccctgtgctcacagatctagctacaatccccacctgcactgtttttagttgtgtatatcccttaatgttactgaacctcattctcttctgatgtaaaatgaagacaggcatttctgctcaacccatttcatctgtaaatggagggaataagtctttatgaaatgagacaaagtatattcagtgtctgcagtgcagttaataaattagtgtctttctacctgtttctcacaaaactgaaataaaagctggaaaattgctttgtaaaccataaggcactctgcatacaaaagagattactatgaatttttcctaagtgattaactcatgactcctttccatactcctcagcagtggcaacattgggaggctggattttggtgggatggaagataatgaggggactctggtttctggccagctccaggactggatgtgatggttaacgatacttaacatcaccacacagctcattccctagctggctcagtaactatggatctctaagcaatgtcttaacatttacgcttacatctgctaagctaagtatgtactgttccttgatttacatgccacattgattttttaaggggtttcaactgtggatcatgaggcagaagaggtgacaatgaaaggtcaggcaaagacaggagtgtccagtgtggaacacgaaatcccatcctgactataaaacattatatgctgtttattacattttaacttcagaaattatcgactccattttccatttccttgcaatatgtattgagcttttcagtcctgttttgtcatcatgcaaacaagtaaaattcttcaggatgcagacccacctaatagtactaaaaaggaatctttaaaaaatatggagatgtcttctccctatggagctacaggggaaaagacaccactctgtgtcataaaatctatttaaatggttgccgggcgcggtggctcacccttgtaatcccagcactttgggaggccgaggcaggtggatcatgaggtcaggagttcaagaccagcctgaccaatatgatgaaaccccgtctctactaaaaacacaaaaattagccgggcgtggtggtgtgcatctctaatcccagctactcgggaggctgaggcgggagaattgcttggagccaggagatggaggctgcagtaagctgagatcatgccattgcactccagcctgggcaacagagcgaaagcgagactccgtctcaaaaaaagaaaaaaaaaaagctatttaaaagaacctgatatgataaagtattgaattgagaacactcagtgaatatcagcattactctcctgttcagtagagagataactctgatcatcctcagctattttcctgtctataatttgcttatttgtattatttgtgcaaagaagtctttaacacctcatatttcaatagtaatcctaaatcctgttgtttatgtcataattcgctgccctgataatgcttaaactcatctctgtttttctaaaagacataaatatgtataaggtttctatattaagaaaaaagacgagtatgctgtttctgtttacttctatcagcataaaggtataataaaatcccatgagtggctgggcgtggtggctcacgccggtaatcccaacactttgggaggctgaggcaggtggatcacttaaggtcaggagttggagaccagcctggccaacatggtgaaaccccatctctactaaaaatacaaaaattagccaggcgtggtggcgagcacctgtaatcccagctactcagtaggctgaggcaggagaatcgcttgaacccatgaggcggaggttgtagtgagccaagatcatgccactgtactcgagcctgggtgtcagagcaagactccgtctcaggaaaaaaaaaaaaaaaatcccattagggaaatgcacaacaaaacaataatgagatactatgaatacacctactacgatggctataatttattttaaagtgttgggaaggatgttgagaaataaaaactcttttaccctgctagtgggaatgtaaaatggtccagttgctgtgaaaatcaatctggcagttcctgaaatggttaaacataatgttagcgtataatctccagttctgctcctcagatctacctgacagaaatgaaaacatttccacactaaaacaggcacataaatcttcacagaagcattattcacagtagccaaaaaatggaaacaacctaaacatccgtcagctgatgaatgggtaagcaagatgtcatatccttaccacactttagaatattattcagtcataaaaagaaagtaataatgatacacgttacagggacgaaccttcaaaacattatggtaagttaagctagtcatgaaggatttacatactgcatgactccatttatatgaaatgtccagaacaggaaaatctctcaagaaaaagcacattaacggttgcctagggctggagggcatgggggtttgaaagtgacagctaaggggagctggatttctttcggagatacatacgatctaaaattgtggtgatgcttgagcccaggagtttgagaccagactcgccaacatggtgaaaccctttctttactaaaaatacaaaaattagctgtgtgtggtggcatgtgcctgtaatcccagctatttgggaggctgaggcaggagactcgcttgaacccgggaggaggaagttgcagtgagccgagatcatgccactgcagtccagcctgggtgaaagagcaagactctctcaaaataaaataaaattgtggtgaagaatgtataactctgtgaatatacaaaaatccattgaattgtacactttaaatgggtgaattgtatatgaattatggctcaataaagtggttttaatgtgtctcatgccttaagggattactagtttagtatatggtctccagtagtggtttaatgaaattccgtgggagatctcttgagctttattcagagcgttgttttaccctcctagtgtccactccctgctgtctttgcataggagaaccacagtcctgtattcagaggtaaaagtggataagtatctcatgatttgaggatagataggtgtgatggaaagagagttgtcattcacttggtctgccctgttccctaagtgtatgtttgcaccccacacctctgtcatccttgttctgaaatgagtgctattctacctcaggaacatactgatgacccccagcactgtgaaaatcagaacagtgaatggcaagattcaaaggggccatgacaaatattagggaaatggaaaagtagaatgagatccatccattgtggatcaaacctaacagacaatggcagcaagaagtggggagagaagagaaactttctctgaagtcttgcctattctgtgcctccaacaatatgccccttccccataacttgcccaacgaatctcttcaactgtatcctttgtaatatcctttataataaaccagcaaacataagtgtttccctgagttctgtgagcacttcagcaaattaattgaacccaaagagggggttgtgagaaccccatcttttttttttttttttttaagacaggatcacgctctgtcacccaggctggagtgcaatggcacagatcactgctcactgtaaccttgaattcatgggctcaagtgagcctttcacctcagcctcccaagtagctaggactacacaggcttgtacctccaggcacagctaattttactttttattttcttgagacaggtctcactctgttgcccaggctggtcttgaactcttggcctcaagtgatcctccagccatgagccactgtaaatgtctgggaatgccaacttgaagcccagctggtcagaagttctagaggcccagacttgcaactggtgtctgaagggatggcagtcttggggactgagccctcaacctgagggatctgatgctatttccaggcagatagtgtcagaattaaattggaggatacgcagttagtgtctgctgcagaactgattgcttgcttgctggtagggggaaatccccacatatctgggggtcattgaagtctttggtgttgactcttactgtgtttgttgttttcatgtgagagcagaggaaaagcaaggaaatgttttcctctggtcagttttccagaccagtctttacagaaacacacacagagcttcaaacaacactacacttacacagccctaaaagttagtaagtacctctttcagttctgcactccaagcacttcaatgatttcagccttactgtagtcctggtgttgatttttaacatccatctctcagcaactggcaaaaaaaaaaagacaaaaaatatcagtgaagatatatggattatcaaccaacttgataaaattaatattttgcacaataatgcacctaacaactgtaaaatacatgtccttttcaagtgcacatgttatattcaagacagaccacatactaggccataaaaaaagcatccgtgaatttcaaaggatcaaaatcgtacacaatgtattctttggtcaaatgaaattaggaatcattgacaatgaagtacctagaaaacccacaaatgtttggaaattaaacacacttctatataatccataggttaaagaagaaatcaaagggaaaacgaaaatagtttgaactaactgataatgaaaatgcaccatataaaaatttgtggggccaggcatgggggctcatatgtataatcccagcactttcggaggccaaggcgggtggatcgcttgagctcaggagtttcagaccagcctaggcaacagggtgaaacctcatatctacaaaatacaaaaattaacaggatgtggtggtgtgcaattgcatggctgtggtcccagctatgtgggaggctgaggcagaaggatcgcttgagcccgggaagtcgaggttgcagtgagccatgatcacaccactacactccagcccaggtggcagagtgagactttacctcaaaaataaataagtaaatacataaataaataaaaagaaaatttgtggaatggagttaaagtagggattctgtatttaaatgcttatattagaagagaaggcctagaatcaataactacaggttctactttaaaaggctagaaaaggaaaagcagagtaaaccctcggtacccagaagaaaggaaataagatgagagaaaaaaataaatgaaatatataattagccaaactaaaagtgaattctctgaaaaatcaacaaaattgataaaaccttgggtgggcatgacggctcatgcctgtaatcccagtactttgggaggccgaggcgggcagatcacctaaagtcaggagtttggaaccagcctggccaacatggtgaaaccccatctctactaaaaatacaaaaattagccaggcatggtggcatgcgcctgtagtcccagctactctggaggctgagggaggagaatcacctgaacctgggaggtggaggttgcagtgagctgagatagtgccactgcactctagacttggcaacagagcaagactccgtctcaaaaaaaaaaaaaaaagagttgataaaaaccttagctagaattatcaatttaaaaactgcaaagacaaattacatgaaagaacttatcactaaggagcattttagatattagaagtctaacagaattattgcgaggccaaggtgggcaggtcatgaggtcaagagatcgagaccatcctcccaacatggtgaaaccccatctctactaaaaatacaaaaattagttgggcatggtggtgtgcgcctgtagtcccagctactcgggaggctgaggcaggagaatcgctggaacccaggaggcagaggttgcagtgagccaagattgcaccactgtactccagcctggtgacagagtgagactccgtctcaaaaaaaaaaaaaaaagaaaataattattatagacaagtcaacaaatttgagaattcagatgaaatggacaaaatttctaaaaaaaaatatataacttactgaaacacacaagatgaaacagatacattaaggaaattgaggccagacgcagtggctcacacctgtaatcccagcactttgggaggccgaggcgggcggatcacaaggtcaggagatcgagaccatcctggctaacatggtgaaaccccgtctctactaagaaatacaaaaaaatcagccgggcgtggtggtgggcgcctgcctgtagtcccagctactcaggaggctgaggctggataatggtgtgaacccgggaggcggagcttgcagtgacccaagattgtgccactgcactccagcctgggcgacagagcgaaactccatctcaaaaaaaaaaaaggaaatttaatttattacatcaaaaaaagaaatctccaggcctagatggttttgccagataattcaaccagaaatttaaggaacaaataataccaatcttacacacacttttccagaaaatagggaaggagaggacagttcattttttgaggccagtactaccctaataccaaaacctgataaagatattacaaggaaagaaatgacagaccaaaaacctcatgcaaaaattcttaagaaaatggtagcaaatttggctgggcatagcagctcgtgcctataatcccagcactttgggaggccatagcgggtggatcacttgaggtcgggagttgggagaccagactggccaacatggtgaaaccctgtctctactaaaaatacagaaaaaaaaaaaaattagccaggcatggcagtgcatgcttgtactcccagttacttgggaggctgaggtgggaggatcacttgaacccgggaggcggaggttgcagtaagccgagatcatgccactgcactgcagcctgggcaacagagcaagactttgtctcaaaaaaaaaaaaaaaaaaaaaaagaaaggcctggtacagtggctcacacctgtaatcctagcactttgagaggccaaggcgggcggactgcctgagctccggagttcaagaccaccctgggcaacatggtcaaactccgtctccactaaaatacaaaaaactagctgggcatggtgacacgtgcctgtagtcacagatactcgggaagctgaagcaagagaatcgcttgaacctgggagatggaagttgcagtgagccgagatcacgccgctgcaatccagcctgggcaacaaagcaagactctgtctccaaaaaaaaaaaaagaaagaaagaaaaaagaaaatggtagcaaatttaatctagaaatatgtaaaaaggttacaaaatgaaccactaatacaagatttaacaaaaaagaaaaagagaaatagaaaatgctgagctagaagcagttgggttggctgggaggcaggattccatgtaggccaatgacattttgaaatggcattgttttctgcttaacagttttaaaaatcaattttattcatattagttgaataaaggagaaaaaaatatgatcactttagtatataaaaaattatcggacaaaatacaatatcccttcatgatgaaaactctcagcaagctagaagtagatgagaacttgttcaatttgatagtctatgaaaacttccagctataatatagtgatgaaatattaaatacaatcctcctatgataaaaaaggcaacaatgcctatctatgactactaatgcaagtcctagcgattacaataaggcaacaaaataaatgaaacctataaatactggcaaagaagaaaacttcctctgtagatgactcaagtatttacttaaaaatcctaaagagtagattcttttttctttttatagatagggtctcagtctgtcacccaggctggagttcagtggcgtgatcaccgctcactgcaccctcgacctccccagctcaggtgattctcccacctcagcctccagagtatcggggactacaggcatgcgccacctcacctggctaattttttatagagatggagtttccaccatgttgcccaggctactcttgaactccagggctcaagcgatctgcctgccttggcctcccaaagtgctgggattacaggcatgagccactgtgcctggataggtcccaatctataatcgaatgaaatcagcttcttttaatcatccgtccaccatcttttggatggtccaatacctcttcaagagctttcattttactgttccgaaaaaaaagggctgaaccgatagtggatgctaaatattaatgggaaaatagagggatccattaggagaatcttgggctgtttggcatcatcactcactggaactggggacaacttcttagatctctgttacataggacatttcaagataagataatgtttacatgatctaaaatatgactgtgtttaagaagtagagacaaacagttcaccaaaaccatggctaaaaatggttaagaacttgtcagtcttcctcaggggtcctctctttgcagaagcactgagaccacagaggcaagagctggggaaggaaaactgcccatgagatgagatgtgcctctcagcttccaaaatcggggaggtaagagggattctggacaaaatgaaaccctgcacccacaaggagtccagcagacagatgtagacaccaagcagacatcctcataatctaaaagtagggtccagacagcaagtttctggcccatcccacactctgctaatgctgacctggacctaaaattaagccactcaaccctatcttgagataacagagggagaaaatgctccctccattttactttctagggttgcaaagggatgacaccatccacaccagaactgcatgaatggcatcaggaatgatcagagaccataaattccagtgagaccaataacaccatttctggtcctgcatgctcttccaaactttgccactaaccccttcaagaggtacagtctatttccctttctcttgaaattgggtaggcctttgggactcccttgataaacagaatacaacagaaatgacactgtgtatctaacaaggctaggttagaaaaggcaacagaacttcatcctaatctctctcaagatgccccccatggaatccagccatcatgctgtgaggaatccaagcagctacatagaaaggccacaactagatattccagctgtagtcagctgaagctccagccaacagccaacatcaaccaccacacgtgaaaacgagcaagccttcagatgattccgactcccaacctccaagccacctcagctgaagccaagtagagcagagactagctgtcccccaatgctctaatatgcagattcataattaaaaagaatgttattgttctaagccatgaagttttggggtggtttgtcatgcagcaactggaactgcctgatcacaccacacacacaaaagcagaaaacaatgccatttcaaaatggcattgggccacatggaatcctgcctcccagccaacccaactgcttctagctcagcacttcctatttcttttttcttttttcttttttttttttgagatggagtcttgctctgtcacccgggctggagtgcagtggcacaatatcggctcactgcaacctccgcctcctgggttcaagtgattctcccgcctcagcctcctgagtagctgggattacaggcatgcaccaccatgcctggctgatttttgtatttttaatagagacggggtttcaccctgttg[132 bp omitted]tagcattggtcactacctcttttctcagtatccaagttgaagaagagtgaatttatgacctctgcagcttgacaatatttacaaagaactctcttgagaagtgctttataaaccttgtcatttaatcctcatgcagctctataatttaatatattatttccattcaacagagcaagacacaaaaggtaaagaaagcaagtaagccaggtgcagtgactcatgcctgtaaccccagcactttgggaggccaaggtgggaggactgaggccaagagttcgcgatcagcctagacaacatagcaagatcctgtccctacaacaaaacattaaaaaattagccaggtgtggtagtgtgcatctgtagtcctagcttcttggaggttgagctacttgaacacctgagcccaggagtttgagactgcagtgagcctcatgattgtgccactgcactccagcctggacgacagagcaagactctgtctcaaaaaacaaaaaacaaagagggcaagtaatttgcctaaatttcagtaagtgtcagacttatattctctagttggatgtagcatatacctacaatatacatataatattgtctagttggagatagcatatatctacattatacatatctatatagaagtataaataaatatatatggtactatatctagttggatacagtattctatatatgtcaattaggtcgtttgctcacctccatcattaataatttctagtctccttattctaagttactgaaaggtgtgctaaaatctccaatgatgactgaatttgtctattcatcctttctcttttattgacctttttatatcctgaagctcttttttttttttttttttttttttttgagacagagtcttactctgtcacccaggctggagtggaatggcatggtcttggctcactgcaacctctgcctcctgggttcaagaacctcccaggttctcccgcctcagcctcctgagtagctgggactacaggcgtgtgccaccacacctggctaatttttatatttttagtagagacagggtttcactatgttggccagggtggtctcgaactcctgacctcgtgatccacctgcctcagcctcctaaggtgctgggattacagacgtgagccaccgcacccagccttgggtataaacttttatcattatgagctgcctccatgttatctctcataatatttttggccttaaactctatttttttgacataaataaacatcagcttttgttggtgtttgcattaccaccttcatacttttgctttcaactttttttttcttcttttttttgagatggagtctcactctgtcacccaggctggagtacagtgacttggtctcagctcaccgcagcctctgcctcccagttcaagcaattatcatccttcagcctccagagtagctgggattataggtgtgtgtcaccacacccaggtaatttttttaaatttttagtaaagatggggttttcaccatgttggccatgctggtctcgaactcctgacctcaagtgatctgcccgccttggcctcccaaagtgctgggattacagatgtgagaccccacgcccagccttgctttcaacttttctatgtcattatacttaaaagtgtgtcagctactaaaagcatatggttgattttgttcttttcgtccctcgctctgtcacccaagctggagtgcagtggctcaatcacagctcactgcagtcttgacttcacaggctcaagtgatccttccgcctcagcctcctgagtagctgggattataggcatgcatcaccacactcagctaattttaattttttgtagagatggggtctcactatgttgcccaggctggtctcaaactcctgggctcaggcaatgctcccatctcacccctcaaatgctgggattataggcatgagcaactgtgcccagccaatagttaatctttttattgtttagtccagtttcattaaatttctttaatgtaatgtaaattactaatttaattactatgttggaggtaagttcatcaacatttacttctatgtgtccccctctttttttgttgttcttttattcccccattcttaccttttattttattggtcaaataattttattattctagtttgccatattagttcatactgtcatgcactattattttagttaccataaagattataatactgtgcttaacttgttacaactaaaattctcatgcagtgcttctgacagcataagtacaaccacagtggaaatgtttagcagtatctacgaaaactgaacatacatacatcatacaatccagcaattctacccctgtttatctccataatgtctgtgtgcaggggtgggggagaggattaatacttatgtgcatgtctttgtccatattttgacaataatggtcatactagcagtatttctatagaaaaatttgaaacaactcaaatttccaacaatagaacagataaataatctgtgccacatcctacaatggaatactacacagcaaaaggaaggaacaggtacctgctatatggaacaacatggatgaattttacacagatattgagtagaagattattttacttatgagaagttaaaataggtagatattaaaaggagaggtacatgaaggaaatatttttattcagtgggaccccaggagactggataaattatccagatcctacattattgcctgaacaggtagatttgagcaggctgcaatctgttcacccaccaaaagcccatgccacattcctgtagatatctatacttaaaatgacaaagacacacgttcctagagggtcttggaagcgggtataaagttggtcaggtcacgagagctgcacagccagtacaaggaattgcctgggtaggattcagctttgactctagtaatagctgactggttatgcatccttatattagcattgcttctctgtattctctatggttttcttttcatttaagactacttcttggctgggtgcagtggctcatgcctgtaatcccagcgctttgggaggctgaggctggaggatcacttgagaccaggagttcaagaccagcctaggcaacatagtgagactctgtgtctacaatagtaaaaaatattagccgggccgagtgacatgcacacctgtagtcccagctactcaggaggctgaggtaggagggtagcttgagcccaggagtttgaggctacagtgtgccttgattgcaccactgcaacccagcctgggtgacagagcaagaccctgtctcttaaaaaaaaaaaaatggttgggaggttatgtacagttgcaaataagaacaaaagatgtgattaaaactttcaatatgttaatcttagctctgaaagttactaattctgtgctttgacaagtattttattggcattacctagatttcctcatcaataaaattagaaaaacaacagcaccttgtacctcacagagttgtcagaattaagtggaaaaaaaactaacaacaaatcactcccatggcacataataagtacctaaaaatcacctaataaatatcatctatttgtattgatgatgaaaagactatgtcatgtcatataatctattagtattaaagaaaagtgtcttctgtccttaacatgctttctgaggcctgctctttcttataaagctaatatcttacaaagcacagcctgcaaatgtaattagtcttcactaacaacattacccacagattttttcaaaaagaaaaggacagcagctagagagaagtcattcggcttataaacatagctcagagaatctgacccaaatagttaacaaattgaaaatattaacaaaagatcagtcttgttccttggccaatccagtcttttatgcctatttgtaactattaacatcaattctgttatcagaaatcataaacccatcctcagcagtgtgatttatataacaaagtctcctaagacttctggtcttgaaagattaatgctgtcttgtgaaagttacctaagtctgtacaaatacatacatacatatataattctgactagctaccttacttagctgcctacctgttctcctggtaattatgcataaattaatatgtatataattctaaaaggtgtaaatactcagaatgtttgtcaaatcagttgggcatcaatgacacttcctttttatccctacacacatggaagtctaacaaaagcatgactgatttgaatttctttttcaagctaagagtagagaggtcttctctcattcaaatgactaattcatgtgaatctttctgaaaaaaacaagaacatattaacatatctacaaggaaaaattgagaagaatgtacaccaaaatattaatagtgaacattttctagataataaaactatgagtacttacaactttctattttataagtcaacttaggttactgaatttttttcaattagactgcattaattccatcatcaggaatgataaaacctaaagcatttttctaaagagctgggagggaaagctatcttttacttattaagaaaactgtgagcaaacaggctggcaaaatgacacagagcagcactaaaaccaaactgaccaaaataaacaagcctaccaagtcttgcacattctttttttttttttctttttttgagaaggagtctcactctgttgcccaggctggaatgtagtggcacgatcttggctcactgcaaactccgcctccctagttcaagtgattctcctgcctcagcctcccgagtagctgggattacaggcatgtgccaccgtgcccagctaattattccatttttagtagagacggggtttcaccatgttggtcaggctagtctcgaactcctaacctcaggtgatccacccaccttggcctcacaaagtgctgggattacaggcatgagccaccgtgcctgaccaagtcttgtacattctcttcccatatttcatcaatgtactgagacatttccaatattaagatttttgttcagatgtgcaaaattgaggtaagtggccctttcacactgaataaatactgtttgggccacagtggaggcttaacaaatgtggttttatcattgcctttctttactgaatgaccagttaatataatccttgaaaagctgctaataaacgcctatcatagttcaactgatttataatttagcaattcattgtgtacttttgctcacaaatatgaatgttatatgatattccatcttatattttttatattagtatctccaatttcttattatctatgtagtattacatcacttggatgtaaactgactgacttaatatttacataatacaggaaattgtttttggacaaactcttcctaaagttcatttccaggtgttatagatcagtggttcaaaacatttttgggttgtatatacccttaatactctcataaaattagagacttttgccgaggaaaaaatacgcatgaataaaataaacatacaataattaggtatataattccaaggcaaattattccaggtgaagtatccctgttctagacagagcatatttgtgagccactgcacttgaactccacaaatttttgaattgcatataattttcacatgtcatgaaatattattctccttttgatttgttgtcaactattgaaaaagttaaaatcaatcagttcacaagccatacaaaaataggctacaagcagggtttggcctacagagccatagtttgcaaacccctgctatagacccagagaccattataccatacacaggctacacaattatgtaacttggaaaaaaaaaaagacacctcatgctgccaaacctcatgcaagaactagctgggtaccacatctccatctcttaacatctccatatcaaacacaggctgtgctttttctgttggaaccttcatcctatttccttaattacaagtgtaatttttttttttttttttgagacggagtctcgctctgcctcagcctccctgagtagctgggactatagacgcccaccaccacacctggctaatttttttttatttttagtagaaatggagtttcaccatgttagccaggatggtctcgatctcctgacctcgtgatccgcctgcctcggcctcccaaagtgctgggattacaggtgtgagtcactgcgcccggccacaagtgtaattcttaattacaactgtattcctagctacttggaaggctgaggtgggaggactgcttgagcccaggagttccaggctgtagtgagctatgatcgcaccactgcccatcacaattaacctcatattttcattgcaccttatatgtgaatgtggaatgacttagaatatccacataataaggttttaaatttaagcttaataatttattattatcagccaccgttttgttactctgttaatagtaactttgctaatcctcataaaaatcctttgaaattggtactattattatataaataataaactatagaacagaaagatattgagtatattgcccaaattcacacacagtattaataattagcaaaaccttagattttaattcagatactatagaataggggttggcaaacttttctgtaaaggactagatagtaaatattttaggctttgtgagctaaaaggcaaaattaaggatattatataggagtttatataaaagagagatgaaaaatttcccctttgtttttcctttttt[134 bp omitted]tctcccaggctagagtgcagtggcgcgatctcggctcactgcaacctccgcctcccaggttcaagcaattctcctgcctcaggctcccgagtagctgggattacaggcatatgccaccatgcccagctaatttttgtatttttagtagagatggtgttttgccatgttggtcaggctggtgtcgaactcccgaccttgtgatccacccaccttgacctcccaaagtgctgggattacaggtgtgagccaccgcgcctggccacctccacaaatttttaattgccaaaatccaaaactttatttatggacacaaatttaaattgcatataattttcacatgtcatgaaatattactctcctttttttttttttcgtggtcaactattaacaaaaagttaaaaccaatcagttcacaagccatacaaaaatacaggctacaggctggatttggcccacagggccatagtttgcaaacccctgttctagacccagagaccattataccatactcacacagtcta[132 bp omitted]ctgatcaacatggagaaaccccgtctctactaaaaatacaaaactagccaggcatggtggcgcatgcctgtaatcccagctactcgggaggctgagggaggagaatcgcttgaacccagaaggcggaggtttcagtgagccaagatcgcaccattgcactccagcctgggcaacaaaagtgaaactccgtctcaaaagaaaaaaaaaaaaaaacacgtgatgcggccaaacctcatgcaagaactagctggtaccatataaatctcctaaggtatcccctcggaaaaacttcctgcccttcttaacagctctctctgcacatactctgcaataatattctaactcctaaggtcctctaaaacaaaaaaagttactataaccattcaaacgatctcctatcttgctgtttttccactcatgtctctgaagaaaatctaaactatctaatgtgtaattctacctaagcaattggtctcctccgtaacaaatcaccgtgtgaaggcagactatttctatgtcatgagaatgcttaaacaaaaagagcacacaggagaagtgaacatactgtcaaggtgttatatgaaaattaactctaggaagggcatctgatgaggtactggaaagaaggagatctgtcttcataatgtcatcagtaactgggaagagaaggactagagaccaggtaaatagataagtcactatttggtgagcatttcaaatgaagttattccacatcctgaaaaacaaaaatgcatttcataaaacaaagaaaaaaatcaaaatgacctccagctttgctttaaaatgtgcaactacaatgcttttcttctctcagagctcttctcttggaatacagcaaaatgtggaaagaaagggaatcacaatatactcagcctttcttggagcccagacaggctaaataagaacacattcttcaccaccggcaagcttccataacccatgctgaatatgaccagatggaagtatgagaaagactggaatattgttgactcttcccttcataaagaaaagtcaggttcaccaaagcctgggactgaaatgtttctgtattcacaataatttcctttagacagctatgaaaatgctgtggatctgcaa[135 bp omitted]caacatggtgaaaccccgtctctactaaaaatacaaaaatgagccgggcatggtggtgcatgcctgtaatcccagctactcgggaggctgaggcaggagaattgcttgaacccggaaggcggaggttgcaatgagccgagattgcgccactgcactccagcctgggcaacaagagcaaaactccatctcacacacacacacaaaatctttggagaaacgaatcctactcctggggcctcaatatcatatcttcccagaaccttgccttgggagcaattccagctctaacatctccatatcaaacacgaggctgtgcatatcagaacacagccttgtccatgtgaaacacaaggctgtgctttttcagttggaaacttcattctggatctcaaatatccaactttcttttcgatagccatttgactgcacactgtgcaacgtggttataaggtgaaatgactgaggcagtgaaagaaatcccagtataacaaactccaagaaaccacgtaacttaaaattggccccagaggttggcgaggctgcatgccactgtgtattatgcattatgaaagcgacaggggccatgctttagaacagaaggtctcagagtcttcacagacacagatcgagccatacggggaccttgtccacgtattcctgagccccagaactgcagaaatcaaactctacaaaagctgcaccaggccagttttgatcacagtctccagtgggtcacaacagcgctgtcacaggatcactgataacagcatgacacattcatagtcaccgctcagcgccgtcacacaaacggccccgcccccactcagtcccgcgggcccaatcggggacagtcagggctgtcccgggctgtgcacctgctgtgcacacacaccccctgctgtgcacaccccccgcccccccgggaccatcacaggcgcgcccactcacaccaccacacacggacgcagccacagaacggcacacacaaacacaatcacacagtctccctccccagcaggtgacttgcacacaggcctggggcttctgcctccacaaaccctctccgcgtcccatgaacccaggtcccctgccgtgagctcttctcgcatccagacccgggtcacctcaactcaccacatggaaaacgaacaccaggtcaacggaaaagggagccggggtcctggcagaagcgtagtgccagccgcaatagggcggccgtgggtgcaaacggaggggagcgccggcagctagcaccgcgcggcgactaacgggccgccccggagactcctgggagctcaggcccacgcgcgagtgcgcaggcgcagacgactcaccctgggccgggggtgaggcttggtgggtgccaggggtgctgaggaggccaaggagggcactgggagctccgttccgggagagctgtctaaggacgcggaaccgggtggggaggccagggaggtaaccaagagtccgagccgggcctggaaattctgaggaggaaaccgggaccgcggtatccagacgctccgatctgtacgagccgggcctcgggcgtggtccatgggcgtgaccttgagggtgacccggagcgagctccgcgaagggggattttgcccgttctgatcccgcggaagcgccatcgctggcggcgggtccccgcgcggagcgggcgctgtgtgttcgcgcgcgcgggcgcgcgctgaataggggtggcctcctgcgcccaacctgctgcattttaggtgcttgcctctctttgggatgttgtggccgattgtgtgtgaaaagtgaacggagtagtgttgctgcgcgaggtttcctctgcgtgtgtctatttttagattaggtgtgagtcgcatttgagactgcctttgagtgtggagaattgcaagtgatttgtaggtgtggttgtgactgcctggagtcgtgttagctgctgtctgaggttgtgaatgacaagtggggcctgtaggttggtggttctctgaaggatgtttgattgactgtgactctgcatgtgtttgtaacctactgttacttctggtggttttgtggccttagtgacctaaatatttgaatgattgaggaactctgttatgaccatggctagttggttatgtaagacttgattatctgaatagtagccattaagcctgcctccaaaactgtaactaagtagcaatttagcaaataaaatagagataacagtatcagaggggaagagatgattttcataattcccagattcatttcctggaaacaccatattaactaaaaccagtatgttgaaatgaatagcattccattggggacatgcaggaaattttttttttttttttttttttaccataactaccacttttgttgttgttttttgtttgttttaagacaaggtcttgctcttttgcccaggctggagtgtagtggcatgatctctgctcactgccacctctacctctgaagttcaagtgattctcctgccccagcttcctgagtagctgggactacaggcttgtgccaccacgctcggctagtttttgtatttttagtagagatggggtttcaccatgttgcccaggctggtcttgaactcctgacctcaagtgatcccctccccccgccccctcggcctgccaaagtactgggattacaggtgtgagccactgtgcctggcataactaccactttcaacacttgtatatgagtgaggtttcctactcccttaggcttgctaagataataaaaagtatttgatagatttttaataagtccagtctcactgtagtaattaaaatagttattttgcgggcctggtgcagtgactgatgcctgtaatcccagcattttgggaggccaaggtgggcagatcacctgagatcgagaattcgagaccagcctgaccaacatggagaaaccccatctctactaaaaatacaaaattagccgggcatggtggtgcatgcctgtaatcccagctactcaggaggctgaggcaggagaatcgcttgaacccgggaggtggaggttgcggtcagtcaagattgtaccattgcactccagcctgggcaacaagagtgaaactctgtctcaaaaaaaaaaaaaaaaaagattattctcaactacaacatagaccagataggcaaagatttaaaagttgtcaactgtcttcatcagggcttgggaaggtattctcatccactactatcagtgtaaattggcaaaaagtccaagaagaaccgtttggaaatacacagtaaacctgtggttagaggtagatggaaggcagagctgcagagggaaaaacacagtgttccctctcttcaagctaaaacaggttccccagaatcctgtatactttaccaagagactgggtttctggtgtttgtgagggagcctgatttgtctgttttcccactaactaccatcctggacatctgaagggtacacagggtggacaagtgctgaaatagtgaacattcatgcagatttaactgagttaattctgggagttctgagtcaagtatggtctcacatacgtatatcctccatctttgctttctcaggactgtttctttttccaaaagaggagctcaaaagagaaagttcatctagaaatctcaaagccatgtctcaggtgagatgatgtttcctctctttctgaaataactttttttcatggtgtatgaacatgagcttcactgtcctttaaccttccctgatattgggatttgcttccatgaaattagtcttcagtcagggccagattaggctgaggcaggcaagtggcatgaggtgaaatatttaaggggtaccctcagggctgtgccctcctaaattttgcattctaggtgcctcacctgcctcaccctgtatccagccctgttcacaatttctccattccaaccaaatcaacttaagccttccccaagtgtaccttctggttgtacatattcattgggtatatcattcatcatctcctttctcagtcttctcacaaacaaactgctggaatagaaaggtattgtcttgatttaaatgggaatatatggcttgaatgaatttaacttgtcctgatgctgatttgagacctaagctgtgagtagtcatggagcagacgtggaaaaaccttgatgatctccgctagcctaggttttgcaatggtacgttgggaaatagaagtggtagatcccagcattagtttctggaaagatgtcctgctttgtgaggtgtttaggatagcaatttgattgcaggcttgtaaaggaaacacgttttatgttcctcctctctgatcttttttcattcatgtctgctagccattcctacaaattgtgggctgccagtgaaaacctttccagtattccaatgctgttagagatttgttattttctttttagtttcttctaattttttatttgcgggtgcaggagaaggaaatccatatgccaggccacttttgaaatattctattgttgatcaaacagtactttgtcctcttttcatatctttcagaaaattcctctttagctcatccaccaacctttaaaatactggttttcctcagatgctaattggttctcttcttcttcacagtccgtttttctctacgcacaatcagattcactctgaaggctacacttagtgtgattctagtgactctcaaatacccctctccactctagacctctgtccagagtgtcagaaccgaatattcaacctccagtagctatcaccacctgtatgttccacagacaaagtacatttccaaagcttacctcattacttcctttggtccagcttacattttcttccgtttcccattttcactttctagtcccagcagccatgcatttgcctatgcagataaaatgcctgtatcttttccactctacagccaatttacgaccatctctgttgtaatggtggtcatgtaggagcagttgtcctctgtcagcccgctgacacttccttaatctaggagacatttctaaccatggttacttaattgtcatttccacctaacatgtgataagccttttccagtcttcaggagtattacctcaaaacttttatcacataacgtgtgtcaacttatgtttattgatgttctttacattccttaaagcaacagacccaaagtagggcatgcctcacagtagaatgtataagacggtctattggaaggaaataaaatactaacaatttacattcgagagcagtattcattaacaatgtagattttcataaatgcctattgatggtttataaatagctacaatgttgggaatgtgttcagtatatctttaagaccactgttctgtaggaaaaaaaaatctagtatcatgtcataatatccccattgcctatctccatataccttttccttcttagagctcaaagactgtttcctaacatactgtgccttttgctatttcctgatttactaactggtttttttctccccatgaatttttaaaagctgatgccctgtattcctacaaaacaaattcgttgtgagtacaaaacttttatgtcctcaatgaagcctcggagtacaaaatgaaatttttccttgttttgtgacactttaccttgtacgtatttctgtcattgcatctgtaaaacctactaagtgcatgtatttacatgtatgcccctctcttagcctataacttctcatgagcagggtcagggttttattcattttggtctaccaggcaaccagtcacattcaggacaaatagtgtgatctcagtatgtttagcatgagattataagtaaatacaaatggatgtattttcagagagaattttatgcaatataaaacataaataaggaaactagtctgaccagtaaacattgtcagtactaggtctccaatatctagttctcacacatttccgatcacttcaggatgaactagagtatgcccttacagggatcagtgtcattcaaggatgtgactgtggacttcacccaggaggagtggcagcaactagaccctgctcagaaggcgctttacagggatgtgatgttggaaaactattgccacttcgtatctgtgggtaagaaacactcctgaatctttcactgtcatgcatctccttctaagaattcctgaaacatataggactttgaatttcagg[136 bp omitted]catggtgaaacccagtctctactaaaaagtacaaaaattagctgggtgtggtggcacatgcctgtaatcccagctactctggaggctgaagcacgagaaccacttgaacctgggagacgaggttgcagtgagttgagattgcaccactgcactccagcctgagtgaaagagtgagactgtctcaaaaaaaaaaaagaaaagaaaaggaaagaaagaaaagaaaatatgattatatcatcacttgtgtagtgtaaggtattaactttggtaagacattaatgtatacctcatttactaccttgaagttgtatctttatcttacttcaatagttttaaagtcgaaacagcttagaccaaaagtctcattttccatcatcagggtttcacatggctaagcctgatatgatccgcaagttggaacaaggagaagagctatggacacagagaatttttccaagttacagctacctaggtgagtctataaatgaagtctagtgaacattaaatgtcaagtagttgaagcctttgaatgtttttagggatctatttttgttattgtggtaaaatacacataacattaaatatgctatcttaaactttttaagcatatagttcagtagcatcaagtacattcgcactgttgtgcaaccatcaccaccatccatctccagaactattcatcttgc[134 bp omitted]atttctggctaacacagtgaaaccctgtctctactaaaaatacaaaaaaattagccaggcatggtggtggacacctggaatcccagctactcaggaggctgaagcaggagaattgcttgaacctgggaggcggaggttgcagtgagccaagatcacaccactgcactccagcctaggcgacagagcgagactccatctcaaaaaaaaaataaataaaaataacttccctttatccctactccctagccatgccaaccaccattctacttgctgtctctgtaaatttgactactctaggtacctcttgtaagtgcaatcacatagtatttatcctttttctgactggcttattttacttaatgtaatgtcctccaggttcatctatttccttcatttttaatgctgattaatattctgttgtatgtatatactatattttgcttattcattcatccgtcagtggtccgttgggttccttccatcttttggctattgtgaatattgctgctatgaacatgggtgtacaaatatcagttttagtccctgctttcagttcttttgggtataatctcagaagtggaattgctgaataatgtggtaattctgtgtttatatttaaggagtcaccatactgttttctatagcagctgcatcattttacattcccaccaacagtgtacaagggttccaatttcttcaccagcacttgttattttctgtattttcgtagtatccatcctattagtgatctatttttaaagacctgagatctgtaaagtgcctatacatggctgactttcatgcctctaaaatgtaaattttaggtatgaatatcactccccatgtaaatcttttcgttgtttgcctgggtttgtggaaatattgctgctattaccttaccaagaatctattccatgttttataggtataatgtacatagagatgtaaagtgtaaagttctttgaattctgacagaaggataaacccacgtatctcacactccaatcaagataaaagacagtttcattaacccattaagttccaccaggcctcttccaactcagtccctcccattaagataatcacagttgtgatgtctaccaacatagattcattttgtctattgcaaacctttttcatgtctgctttctttcactcagcttcatgtctgagagatttatacatgtttctgcatgcataagtagtttgttaactgtggaacagttttccattgtacgagtataccagtttatgcatctcttgttgaaagacatttgggatgtttctagtttagacctattatgaacaaagctgctataatcattcttgtaaaaatatttttgtggacatacatgtttatttttcttcagtaaacacgtagcagcgatatcgctgattcataaggcagatgcgtatttcatttctttagaaactaccattttggtttggtagtttagtagctaaaactactataccattttagactttcatcagcactgtatgagaatgttgattgccccacgttcttttctacattttatgttcattttgtccattctggtcattttgaccattctggttgtataacttcgcagttttaatttagatttatcttacaactaataatgttgaaaactttttcaagtgcattttatatcagaggcatctgttcaagtgttttgtttgtttctttgttcgtttgtttgtttgataatttttgagacagagtctcactctgtcgcccaggctggagtgcagtagcacaatcttggctcactgcaacctatgcctcccgggttcaagcaattctcctgcctcagcctcccgagtagctgggattacaggcgtgcgccaccacacccagctaattttttgtatttttagtagagacggggtttcatca[136 bp omitted]gtatttttccttgagtagtaggaattctttacatactgtggatagaaatcttttgttcaatgtatgtattacaaatattttccctagtctatgacttgcatattcattttaatggtgtcttttgatgaacagaagtttttaactttggtgaatttcacttaatcattgtttcttttatcattaattatgtgacctctcaaacaaatatttgtctttttctaggtatagtgaggataattctcttttctaggtatggtgaggatagtgctctgtaatttctttgtatattttgcttttttttttttttttttgagacagagttccgctcttgttgcccaggctggagcgcaatggtgtgatctcaactcaccgcaacctccgcttccctgcaacctccacctcccaggttcaagcgattctcctgcctcagcctcccgagtagctgggattataggcgtgcaccaccacgccccgctaattctgtatttttagtagagatggggtttatc[131 bp omitted]ggtccacctcatgttttgtttatgatgtgaagtagggttcgagagtctattcttctatatggttatcaatttgttccatcagtatttattgactgaattactatggtgatcatagagaaaattgatcacatttgtatcagtctatttttggacaatctgttgtttccttggacataatttaagtcacattgacaataccacctggtctttgattattgtaactttataataagtctggaagtcagttagcgtaagtcctctaactttatgctttttaaaaacttttagggccaggcatggtggctcatgcctgtaaccccagcactttgggaggccgaggcgggcggatcacctgaggtcaggagttcaagaccagcctggccaacatggtgaaactccgtctctactaaaaatacaaaaattagccggatatggtggcacatgcctgtagtcccagctactcgggaggctgaggcaggagaattgcttgaacccggaaggcacaggttgcagtgagccaagaccgcgccattgcactccagcctgggcaacagagtgagactccatctcaaaaaaagcaaacaaacaaatgaaaacaacttttagctattctatgtcattttcttctcaaattcattttggaatcaacttcttgatttctttagataaacgtgctaggttttttattagtgagagctaatgtcttagcaatattgagtcctgtggttcatgacaatgctataactttccattttagttagcttctctaattcctgaaagcaattcctatttttggtatagaaatcttacatattgctcattaagtttctctctaagcttttaatatttctgattctattgtacatagtaagagtggctgggcatggtggctcacacctgtaatctcagcactttgggaggctgaggtgggtggatcacctgaggtcagaattcaagaccagcctggccaacgtggcaaaaacctgtctctactaaaagaatacaggtggcacacacctgtaatcccagctactcaggagctgaggcaggagaactgcttgaacccgggagtcggaggttgcaatgaaccatttctttctttctttctttcttcctttcctttcctttcctttcctttcctttccttccctttccctttccctttccctttccctttccctttcccttcctttcctttcctttcctttccttctttcttttttttttttttttgacagtgtctctctctgtcgcccaggctggagtgcagtggcatgatctcggctcactgcaacctccgactcccgggttcaaatgattcttgtgcttcagactcctgaggagtagctgggatgacaggtgggcaccaccatgcccagctaatttttgtatttttttagtagagactgagtttcaccatattggccaggctggtctcgaactcctgacctcaggtgatccgccacagcctcccaaagtgctgggactacaggcatgagccactgccccccgactatttttagtagttttaattacatatagtaattataattttaaccattagtaaccttttaacagagtaaactaagaagtagatagttgtgaattatctgctacatactagcattctataacagattggcaaatgttatgaatacatcatcttacaactttatagatacatatttcctcatagtacaattttttagtgtttaacagatccaaagagcttatccaaaactcttattccacttatattgacctacacagatagtatttattatgtttggattgttcatgaaaattttataatacattaaacaaaactagccagcctctcaagtcatttccttgttaactgtttttatagcacatacaagtaaaaggcaattaaaggcaaatcaagaaaacctgaaaagttaaatacataggtttgtttgttttgttttcctgctgtgtttgatgtatatgaaataatagatatcagacaattcatttctactatatgtttatttgtgcatttttttcttaagttgaatttatagtttttatagttttaaacatagtaaatataatagtaacttatttgactagtaaagccaagtagaataaaaatatgtgctcatagatgcacctctttttattaaaccaacaatattaaactcatcttagttatcaaaattttaccccaagtcacatgaacttgaaaggcctttgggttagttcctacatttctgggggtgttaggaacatttcacttatataaacactcatttttctcttaaaacaatttgaataaactctttaagggagtttataaattaatttggccaagtgttgtggctcacacctgtaattccagctactcaggaggctgaggcaggaggatcgcttgaggccaggagtgtgaggccagcctgggcaacatagcaagacccagtctctgaaaaaatgtatcccagtgcagtggtgtgcacctgtagatccagctattcagaaggctgaagcaggagaatcacttaagcccagaagttcaaggctgcagtgagctatgcactactgcactccagcctgggcaagagtgagacctcgtctctaaataactaaaatgtttaaataattaattaataccatctagaggtaagaaaatatcacatatacataacatacatacatagacatacataggcggacagacccaaacagagatcttataactttcattctaaaatgttagccaggagtcagtaaaatagtattacactctcatctttgctccactttatatttttatctgaatagtgtttctgacacatggaacaaggttagctgttcaatatgtgggctaatgctttttagccaatatttgtagagattttcagattttcatttgccctgttatgtaatcttatggaagctgtggactaaattttaggtgagcaactgagctatctggatgtctccaaagcttggctgagtgaataaaatatccactttgtttccagttagcccttttgtccttctcagctgcaggtagtttcttttgggggccccttgagtgcccccaatgtggggcagggcacctaaagttcaagtgactgtaggggctacagtgggaagggaaaggtcagcagggtggacagagggatggaggagttctgaagggccacctgtcaaaggattcaggggaactgaagggacaatcagaggtggtgagaggaggaaggaggagtggagcagtgggaaaagagaggtcttacaggagccagtgtagagaatccttagtaaagtaatgccaagaagaaaggaagtagagggagttggcagagcatataccaacaggggaacatacaccatcaatcaactgagaagttcccatgggagaaacaggatcaaacaggcctcacagagtcaggaattttctagccctgagagtcaggaagtaaattcccacccaaaagaaaaacccaggaagaaagacttctagcccagcaggtaccttttaaacaaagaagccggtgcctgtaacccaacttcatataaacaagaggagcctaggattctaacccagcctctagagtatgctcagaatctaaggaatcaaaatgttgtaccagcttcaatgggagtttgtccagagtagtggaccaggagtctgactcaccagtgggtccccagtcagtcaggagtgaagaccaaggctcaaaaggtgtgcacttggggtcctgggtgagatgccaaggggtccaataatcaatctgttcctatccaagctgtgttactataaatactaaagaaaaacattatcctgacacttgtaaggcagatctcagggactgctacaatggggttttgaagtactggggagagaatgggccaactctgaatacgataaggaagagaggaaatttatagttgtgggagggggcagtgatgggaaattactgagtggatagggtaatcttgcttagctgacctaccaggattcctactgaaagcaggtcatggtgatcagatatcacctggaggggttggtgaggagagatatcagatattgagagtgggggattccagctaaaccgacttgacagaattctcgctaaaactgggcccttcggtggacatgcccaaggactgggcctaattggttaaagttttatggtattgtcctgagtcctgggatgcagtctttactcctaaaacgtggcccttctggagtctcgatggaaagaccaagattgttgtgctttgttgctttgttttgttttcacctagcccaggacaaaaatgaatggaccaggattttttgttcttttgttttgttttgtttgcctgtttttccactctgctttaaaattttcagtgcatttaaaaataccagaaagggactgccccatattggtcttcatgaatccatgctgaactactctcttttattataacatttccagtttgcttatattgggaccaaggttttaacaaggttcttgttgtcacagggctagaattgcaaactctttttcagagctaaacagccactgaactctttgctcagttccttcagggctctagctttctttcctctttgggctccttgcaatcttgccctgcagcaatgtagttaaccaaggctttgaggatggcttatgccaactttggggctctgcttttttgacttctccattcccagattttgtcttcaagttagggtagctctgaactctaacctctgattcccctatacagatgacttgtgctttctcctggagatctatctcttctgtgctgcctgaactactgagaacatatacctggctaaatgtagctcttatgcagtgtggtttctttctttcaaagattgcatccacttcagcttctggctacttttggtcattctttagtgccttcaaataagtgggttttttttttatcagctggaggattgttttgatacaaacttctttgtcttaccaaaatctagatgtcagccgggcacagtggttcatgtctgtaatcccagcactttgggaggctgcgacgggaggatcacttgaggccaggagttccagaccaccctgcccaacatggcaaaaccccatctctactaaaaatacaaaaattagctgggcatggtggcgcccacctgtaattccagctactcaggaggctgaggcacacaagttgctaggacccaggaggtggaggtagatcgcgccactgcactccagcataggtaacagagcaagattctgtctccaaaaataaataaataaatacataaataaatctagatgtccagaccagcagttctcaaactttctagtcttagacatatttaaaatcttaaagttattaagaacttagaagaactttgtgcgcatatgtctgtgtgtatggcattgtaactggcctaagtccagctgctcactgcttagagaccaaaaacatgagaagtgaggaatggtgaaaggaaagcaacttgattgattaaatgccagcagatgggagttggcaaggcttctgcctcaaagaagccatctctaccttttgggctgagtgaagggggttgtgaaggaaaggatgtggaaagggtggtgcaggagggcacaggcctgtgtgtcttgttccgatgcttatcttgagtaattgctcttccggaggtccagtttgcatcattctgactttggcctggtagtggtgggctaactatttgtaacccccactaagtggggaggattctgcagctgggtgtctctgcctggtttgtttcaaaattggcccctggaattcctaagcaagcacataattagataagtaaacactgttcacatggaagtgccaggtgagaaggtgacaaagcgttttaaagtgtctcaacgttgaaagcaagaaaggaaaaaatgttttaaagtatgtttgaggctgggttacttggttacactattcagaaattaaaagagtttttttttttttctttttgagatggagtattgctctgttgcccaggctggagtgcagtggcacgatctcggctcactgcaagctccgcctcccgagttcacaccattctcctgccttagcctcctgagtagctgggactgcaggcacccaccaccatgcccagctaatttttttgtatttttagtagagacagggtttcaccgtgttagccaggatggtctctatctcctgacctcgagatctgcccgccccggcctcccaaagtgctgggattacaggagtgagccactgcgcctggcctgagagagccttcttaaacctatcagaaaaataaaaatcattgtttaatatctatctccctcatagttttcactttcttctctttccctgggcaaagaaagattatttctttgtttcctgcctgagtctcacatcccattctcaccatgagacctaccaccaggttccaaaatccatatgcctgggaccaaaatggtaatttgaagatcacaatttctttccagtaaacttttatgtttcatatcataatgctgagcatcattcttgatatctgccagggatagttgtgggatttgggtgaaaaatactaactcattctcatcctatttccctgagtaccttttcacatcttgtttgcttttatcccctttatgtaccttgtctaggacaataaatatttgttgactaaatgaatcttgtttcattaggcctctcattggtcctttctgatgtgtccttaaagcattttattcactctcagttcttgactttatgaaagtcctgcaagctacaatcatctgatgaattctcaaattgatttccttgttttatgtgaattgctttcaaatagacatttcagcccatttctcccttgtcaactgtagtggtatattttaatctgccaacagaaatatgactatcaattgtcctatcctttttggtttacaatatatcagaaataataattgctatctttactcttatttgtttattcttttgttcccataatctttttttttttaattgagatggagtctcactctattgctcaggctggagtgcaatggcatgatctgggcacactgcaacctccacctcccgagttcaagtgatcctctctcctcagccttccgaatagctgggattacaggcacgtgccaccacgcctggctaatttttgtattttcagtagaggtggggtttcaccatgttggccaggttggtctcgaactcctggtctcaagtgatgtgcccaccttcgcctccgacagtgctgggattacaggcatgaaccaccacgcccggcctgttcccataatcttatttattattgtttgtttctgtattctcttgttcccataatcagcccaagtagtataaaattgagtccatcatctctgttatactttcttaatgatctctccacaatgtgttatattatctcactctgtaaaatatctttacatcttcttatattctgatttgccattgacagcttccaaaatgagagccatatcatttcaggtgtgggctactgtaattaatctttggatttgccatgatttttccctagttttttttttttttttttttttccagttttttctgtcattatgctaaaaagataacactttttaatatgaactttaaatccctctgttttcaagggtgacaggatcatacccgatttggtcattccaaatgtatttctgtctgtgactcagaactttcgataatctctatttgttcaagactactaaatatacttcatatacagtcagccccccgaattcatggcttccacatcagcagattcaaccaactgtaaatagaaaaaaatacacacacacacacacacacacacacaaaatacaaataaaaatcagtatagtataacaactgttggcatagcatttgcactgtattaggtataagtcatgtagagatgattcaaagtatacaggaggatatgtgtaggtcatatgcaaatactacactattttatatgagggacttgagcatctttggattttagtatccttggggatttcggaacctgtccccttagattggataatgagggaaaactgtaattggttttattcatcacagctggacctttccttatatgatggatactatatgttccatatatacttgcaaaattagccaactaggaagttagagggtacagtaatccatccaagactgcctttacttctgatagcagctgttaattcagggatcctcaagactgcccttaggttcgataatttttttttttttttgagagatagtctcactctgtcactcaggctagggtgcagtggcgtgatcttggctcactgcaacgtccgcctcccaggttcaagcgattctcatgcctcagcctcccaagtagctgggattataggcatgtgccactacaccctgctgatttttgtatttgagtggagacggggtttcactatgttggccaggctggtctcaaactcctgacctcaagtgatccacccacctcggcctcccaaagtgctggaattacaggcatgagccaccggtggcacccggccaggtttgataatttgctgaaaagacccatggaactcagtgaaagctgttatactcacagttacagtttgctacaggaaaagattgaaatcaatcaagggaagaaggaaatgggcagagtctgggaaagtgccaaacatgcagcttctagtcgccctatcgccgtggagtcatggatatcaatcctggcaacactatgtgacgatacatacagagtaccaccaaccagcgaagctcagcacagcctcagtgtccaaagtttttattggggctccatcaaataggcctgattgcccatgtggctgagctcagtttccagcgccttaggaagctgagctgatgcttgctgcatgactcaaagcccctaccctaaatcatattgttactgtctggccagccaaagactccccagcaaacaaataaactcctattagccatgacattcaaaggccttaaaaattaccaccctgaaactgaagttaaaggttcggcctctcatttggcagggttaaattctttaccacacaatactatataatatatcatttagctaaaaaatcaagtttcatttcctccatgaaataccttgactactgtatagactatgtctatttctgttttttatgcattccattgtacttgacatctgtaacatgtgagcagacacgtcctctgatatgatctagtaatttggtacctaattcaacattgttttatatgacatttctttctctatttggttataatcattccccaaaataaggtcctctcatttgcctttccttactgcagcttgtaacagaggccatgtatccagtagttatcttattgattgtcgtgccatgcaagcgaaaatgtctttctcatccatttagaaatcatttactactaagttctttttaggggtacctgccagcattttatcccctaacttcagataacagtgtgtaaacgtatactgagaagattttagagaaaatcgtcaataaaatgttgacctccaaaaacatgagttttagttgggaaagcaatactgtattatcaaattgaggactttacatagaatgatcgtgttaaaatcttaggccgttggaaaatatctggaagtgaatgttccagaccataattatattacaatttcagacagacgggatactgaaaggtagaaaaactatgtgaaagcttagccgggagcagtcgctcactcctgtaatctcagcattttgggaggccagggcaggtggatcacttgaggccaggggttcaagacccaccaggccaacacagtgaaaccccatctccgctaaaaaatacaaaaaacatcagtcagatttggtggcacacacctgtagtcccagctactcaggaggtcgaggcatgagaatcacttgaacctgggatactaaggttgcagtgagccgggattgtgccactgcaatccagcctgggtgacagagtgagactctgtctcaaaaaaaaaaaaaggggccgggcgcagtggctcacacctgtaatctcagcactttgggaggccgaggtgggtggattacaaggtcgggagttcgagaccagcctggccaacatagtgaaaccctgtctctactaaaaatacaaaaattagccaagtgtggtggcgggcacctgtaatcccagcttctcatgaggctgaggcaggagaatcacttgaacctgggaggcggaggttgcagtgagctgagaccacgctgttgcactccagcctgagtgacagagtgagactttgtctcaaaaaaaaaaaggaaagactatgtgaaaactttatgaaaaatcggatagtagcatatacttggaggtgtttgaagttcttagggaggcaatgtaactccaattaccaatacagattagttttacgtgttcaaactgcacataagtggaattgtataatatgtattctttttcataaagcttacactctgcaaaatatttgagattcattcttgttgtcattgtgtatcagcattgtttcttcttgttgctgaggtagtattctattgtgtaatacatgacacagttttacctgttcatcttttgatggatatttgggctgttcccagtatggggctattataaataacaatgttaatcataggtaagatgaatccatctttaaattgccctcccaaatatggatggtagtaaggcaacaatagtaagatatacaataattttttttaaatagttaagattaatcagtgctctgcacatacattgaagaatccagtcctttacagctccagtagggaatagcagagttaaggtaggtgatgtattgggaggaaaactcaaacctatctttccctaaagctgaaaagaagtaatttggcaaatttaaggaatgaagttagaattgttggtcaggagaatttcattattgaccatctctggcagaataaattgaataaattgatggtaacagcaatcagaatactacagtttccgggcactgtggctcatgcctataatcccagaacttttggaagatcatttgaggccaggagttcgcgaccagcctgggcaacataggaagatcccgtctgtgaaaaaaaaaaatcaaaaattagctggatatggtggcacacatctgtagccccagatacttgggaggctgaggtgggaggattgcttgaatccaggagatcaaggctgcagtgagccaggatcaaaccactgtattccagcttgggggacagagcgagaccctttctcaaaaaaataaaaatgaatttaaatatatatatatatatatatatatatatatatatatataatgtatacacaacagtgattatattcatgttggaaatatattttgtcttttgctgtattttataattcctcatgggaatatgttttccagattctctgctttcaagagaaaataaattacggttatatggacatctagggcctagactgtagactaatgtttctgtaaacactaggaaatgagctgagaaagttcatttaccattcatgggctaaatgcaagtgaagaagaaagaattggaagcacttataacacatttagtcgtgaggggataaatgtatagcttttcatctcttcctaaataattttttgtcacattgcctactgttcagcacccttggtaggctcacttcagcagctttgaatcttccattccaagtagaatccctctttcttcattctttctcttctgctcacttatcttttttttttttttgggtggggcggggggacagagtttcgctcttgttgcccaggctggagtgcaatggcacaatctcggctcactacaacctctgcctcccaggttcaagcaattctcctgcctcagcctcctgagtagctgggattacaggcatgtaccaccatgcccagctaattttgaatttttagtagagacagggtttcaccatgttggccaggctggtctcaaactcctgacctcaggtgatccgcccgccttggcctcccagagtgttgggattacagccatgagccactgcgcccggccatccttgtgtttcctataccttctcagtgcagcttatatttataacatgccaaagatatgagtgttttttgcttatgccagtttttcttcattttaacagagtagcaagatttgtatttatgtttatacattttccctaccaagaggtaatttattctggcctttttgtagatcacggtagtgagatagtcccaccatagtttgtctgtatgtatacccaatccatagcatttatgtgaagactcacagtgttaatggtattcttttctagaagaagatgggaaaactgaagatgtcttagtgaagttcaaagaataccaagacaggcattctagacccctcatattcatcaaccacaaaaaactaattaaggagagaagtaatatttatggtaaaacatttactctaggcaagaaccgtatttcaaaaacaatactatgtgaatataaacctgatggaaaagttttgaaaaatatttcagaactagtcattagaaatataagccccataaaagagaagtttggtgacagtactggatgggagaaatcactcctcaataccaagcatgagaaaattcatcctgcagtgaatctccataaacaaacagaaagagttctcagtggtaaacaggagcttattcagcatcagaaggttcaagctccagagcaaccatttgaccataatgaatgtgaaaaatccttcctgatgaaaggaatgctatttacacatactagagctcacagaggagaaagaacctttgaatacaataaagatggaattgccttcatagaaaagtcaagcctcagtgtccatccaagtaatcttatggaaaagaagccctctgcctacaacaaatatgggaaattcctctgcagaaagcctgtttttattatgcctcagagacctcaaacagaagagaaaccctttcactgtccttactgtgggaataactttagaaggaagtcatacctcattgaacatcagcgaattcacacaggtgaaaaaccttatgtttgcaatcaatgtggaaaggccttccgtcagaagacagccctcacccttcatgagaaaacacatatagaggggaaaccctttatttgtatcgattgtgggaagtccttccgccagaaggccaccctcactagacatcacaaaacacatacgggggagaaagcctatgaatgtcctcagtgtggaagtgcctttaggaagaagtcatacctcattgatcaccagagaactcacacaggagagaaaccgtatcagtgtaatgagtgtgggaaggcatttatccagaagacaaccctcactgttcatcagagaactcacacaggagagaaaccctatatttgcaatgaatgtgggaagtccttctgccaaaagacaaccctcactctccaccagagaattcacacgggggaaaaaccctatatttgtaatgaatgtgggaagtccttccgccagaaggcaatcctcactgttcatcacagaatacatacaggagaaaaatccaatgggtgtcctcagtgtgggaaagccttcagtaggaaatcaaacctcattcgccatcagaaaactcacacaggcgagaaaccatatgaatgtaaacagtgtgggaagttcttcagttgtaagtcaaacctcattgtccatcagaaaactcacaaggtagaaaccacgggaattcagtaagtaatgtggctttttttgtaaaaaaatgttaagtcatagtaaaccctgtagatgatgttgcttgcaagcgtaatatccaacagtttaaggtactataccacatggtaacctactgtttgccagcctgtaaaacacacacacacacacacacacacacacaaatattattagacaaattagatgacaaaaatcattaagaagtccaaactttttttttattactagcttcagcagacaaaaacttcctctgtcaaggtgttataaacatttaaaatcacattttccatttccatacatatctttttgttcatcagtaataactagttggccaactgactgtggtccatggactacacagtgagtagaggttctttaaaagaaggaggtatgaactgtatttctcattgcaaatacaaaataaaaattagttgttacctcctcacagttgaccatgattctgacttctaacattacaaattagtttttactattataaacctttctataaattggattatatatcatgtattctttcatatacagcttattaccttcatcatgtccgtgagtctaatcattagtacgtgtggcagaagtttatttatttttatccagtatagaattcaattatatgattatatcacaatttatccattctgctgttgatggacttttacattgtttacagcttagggtcataataaatcatgcttctgagaacatacttgtcttggtgtacatacatgtatttctcttgtgtatatacttaggagtggaatcgctgggtcttagagcatgtgtgtattcagtcagatactggcagacaattcagaactttcaccacatgagataattgacactgaagggaaacagctataaattttatcaatatggtgctggttcaaaccagagaattcatgctgcagggaaactcaatcaatgttattgtgaaaactgggaatgtgaatgtaatatatgtagaaaaacatttagccacagcccaaatcttccaggcaaatgtaataaacgtgacattgccgttagccacagtaaatgccttatttgaactcaaaaagtctactagaggagaggcatccagcatttcccttgttcaacatcagagaattccaactagagaaaagtcctgtgactgtgttgaagttagggcgtggggaggaatatagtctttacctatggtctgtatctactggtcaggtacaaatgatgaatatggaaaagcttatagccatcattcatatattatactacaccagggaattcacataggatgagaactcttcaaatgaaatgattgtaagaatgactttaactgttgctcatttcttttacaccatcaaagaattaataccaaagaaaggaagattacaaggaaacaaatgggtcttgggacttttttttttttttttttgagacagaatcttgctctgtcacccaggcgggagtgcagtggcatgatcttggctcactgcagcctctgcctcccaggttccagtgattctcctgcctcagcctcccgggtagctgagattacaggcacacgccacacgcacagctaattttcgtatttttagtagagacagggtttcatcatgttggccaggctggtctcgaactcctgacctcaggtgatctgcctgcctcggcctcccaaagtgctaggattacagggacttttaactctggggaaagctctctttcatgaaagaagtctagccataccgagaccataatgctaggaagtctatgtgtaggccccctggtcaacagctacagctgagctcccagccatcagctagcatcagctgccaaccatgtaagtgaggcctcttggacatccagtcaagccttcagatgactgtggaccctgctaacacccaactggtaccacaaatgagacctcaagcaagaactgcccagctgaggccttcccaaattcctggccaacaaaatcatcaggctttttaactacaaacagttttattttttatttaataaaaaagtttttatttaacttgattgttttattaaaagggaaaagtaattttttagtatctgttaatatataataaaaataaaggtataagcctgggcttggtggctcatttctgtaatcccagcactttgggaggtgttgggaggatcacttgagcccaggagttcgagaccagcctgggaaacatgccaaaaccccatctctacaaaaaattagccaggaatggtggcacatgcctgtagtcccagctactcgggaggctgagtgggaggatcacttgggcccgggaggcggaggttgcagtgagccaggatagcaccactgcactccagcctgggtaacagagcgagaccctgtctcataaataaataaatacataaaggtgtaaatatatggattctagagtcaatgagcaaaggtattgttgttactaataggtgattttggcatgaagaaaaactggccataaaatacagttgaagatttggctgcatttttgccttacgattacataccttaataattacaactcaattgaggggtccatatatattctttctcattttctggcagtaaatcatattcatcatatacttcccaattttgcacacacaaaaaatgaaaatagcccccaaaagaaaggcaggataatgcgatctatcctcaaaagaccccgtgctgtcatttctcaacaaaggcgcagagagaaatcaaggtatggaatctaatgaatgtccgtgaaggaggtacttttgaatgctttaaagaaagtctaaataaagttgcgttttcttttctttttttttttttttgagacagagtttcacttttgtttcccaggctggagtgcaatggcgcaatttcggctcattgcaacctctacctcaagcaattctcctgcctcagcctcccaagtagctgggattacaggcgcccacctgtatttttagtagagacggggtttcatcatgttggccaggctggtctccaaagcctgacctcaggcgatccacccgcctcagcctcccaaagtgctgagattacaggtgtgagccaccgcacccagccgaaattgtgttttctaaagctatttacatataagctgccgctccttaggaaaatttggtcctgtggtttatattttggcatgaaacagcattgggctgtattccagaatcctgcttgaagatttcttttgaagaaatcagaaattttctttgcattttttttatttttttgagacaggttctcagtctgtcacctaggctggagtagagtggtgccattatagctcactgcagacttgaattcctggactcaagcaattctcctgcctcagcctcccaagtagctaggactacaggcaggcgccattcctctcagctaatgtttttattttttatacatatggggtctcgttgtgttgcccaggctggtattgaactcctggcctcaagcaatcttccctcttcggcctcctaaaatgctggggttacaggtgtgagccacttcactcactttagagattttcactttatgaattgataaatacagcattgcatcacttaatagggatacattctgagaaatgcatcatgaggcagtgtcatgatcgtgcaagcatcacagagtgctgatacaaaccgagatggtacagcctactaaacacctaggctatatggtagagcctgttgctcctaggctacaaatctgtactgcatgttactgtgctggatactataggcaattgtaacacaatggtaattatttgtatatgtaaacctatctaaacacagaaaaggtacagtaaaaatgtggtactataatctttttttttttttgagacagagtctcactctgtcgcccaggctggtgtgcagtggtgtgatctcggctcattgcaacctccgcctcctgggttcaagtgattctcctgcctcagcctcatgagtagctgggactacaggtgcacaccaccaaacccggctaatttttgtatttttagtagagacggggtttcaccatgttggccaggatggtctcaatctcctgacctcgtgatccacccgcctcggcctctcaaagtgctgggattacaggtgtgagccaccatgcctggctggtactataatcttatgagaccaccattatatatgcagtccatcatggaccaaaatgtcatgtggtgcatgagtatttttcatctaacttatatattgctcaatgaagtttgggcaactctaaggagcaaacatgtttatagaatctaagtcaacttgacctaaacatatacgacaaaataggagtgattttacaaattcatattttgtagacctaactgcaaggtcataaggcatatgcaaaatgagttcatcagttcagaggactaacaggactccacagagcatacccaggaaatgtttttacttagaagcaaaggatgtggctcagcaaaagaaagggaaggtaagcattagggctcagaatcatctagctgcacattcctcagtggttttattcacacacagaccgcacactgtctctgaactgaagcactaagacctgtatcaaacttgatttggggagagctgacagcagaacttctctacatgggtttttttgttgtcattgttttgttttttgagacagagtcttgctctgtcacccaggctggagtgcaatggtgcaatctcagcccactgcaacctccgcctcccaggttcaagcaagtctcctgccacagcctccctaagtatctgggattacaggcatgtgccaccacaaccagctagtttttgtgtttttagtagagacagggtttctccatgttggccaggctggtctcgaagtcctgacctcaggcaatcctccgcccacctcggtttcccaaagtgctgggattataggcatgagccaccgtgcccagccactgcatgggtatttatgcttctctgttcactggttacatagtcaagccaggctatctaactggttatgtaagtttaaaaaagttaaaaagccatcataaacaaattggctctgggagtctcccagggaatatcagactttaactagtaccttgtatagctcactggccttatcccaaccaagagtcagagccagacatctgggcatcgtggagataattttagagctttgcagtctgactgtaaatcagctccatcttataaacatggttcctataactgctgtgtatttcctgataatgtatgtgaacaagcatatctcctcaccctctgtgtccccagtatcagatagtgcacagtacatctcaaatgtgatcatttcttgtcagctaatgcttgaatttctccactcagtttctggtctagcaatagagccaggcttgccatgtcctgcttcacaagtaatgtgcaacagcaaaagcacaggctccaacactagtctacaacatgcacctgggatgttctagatatttatcagtttataatcaggctttttttttttttttgagacagtgtctcgctctgtcgcccaggctggaggcagtggctcgatcttggctcactgtaagctccgcctcctgggttcacaccattgtcctgcctcagcctcctgagtagctgggactacaggcacctgccaccatgcccagctaattttttgtatttttagtagagacggggttttactgt[138 bp omitted]agtgctgacaagaatgtggaacaactggaactctttcttttttaacttttgttttagattcaggagtacaggtgtggatttgttactggaactttcatacattgctaataggaaaggcaaaatggtaaagccggtctggaaaacaatatgccagtctcaaaaagttacacatccaatatgacccagcaatcccacttataagtacttatcctagagaaatgaaaaattatgtgcacacagaaacctgtacatgagtgtttgtaagtattatttataattaaaaaaaaaactagagacaagcaaatgttcttcagtgtgtaaatggatacactgtggtacattcccaagatggaattctactcaacgataacaataatgagctactgaaacatgcagctacatagatgaacctcaaatgcattacgctaaaggaaagaacccagtcccaaaaagttacatactgtatgattccatttatatgacatgctggaaaaggtgaaaatataacaacagaaaacagatcaaatgttgctgagtgtctggggtggggtggggtctgaatacagaggggttgcacgaggcaattctttgaggtgttggaattgttttgtatcctgcttgtggtcatagataaaaaatctatgcatgtgtaaaaaatagaagtatacatacaaaaaagtgaattgtactgtctgtaatttttttaaataaataaaaatccctagctctgcttcatcagcagcagtacctcctgatttgtgtcttcaaagatatctttagactggcttctgaattacatatccagtagtagtcagcctacacacacacaggccttgccacatggtctcatcattgttccgcaggtcaactcacaacacaagtaacacattacagttagcccgtatttgtaaactccatccagatgatcagccccccattggagtggcaggcttcatgtctgggggtggcacacctatggaagatggaactcagtgtgtgtgctctgttgggcgtctccatcacatctaacagtggctgacaaaccagccaatacatagtcatcagggcatatgcaatcattgggaataatactaagtggggccaattctgctatcccttggttctcagtggtattcttaattccaacacagtgccatttaaaggtccctgattgtatatgtgcagtggcacaatctcggctcactgcagcctccgcctcccaggttcaaccaattcgtcagcctcagcctcccaagtagctgggattacaggcatgtaccaccatacccggctaatttttgtatttttagtagaaatggggtttcaccatgttggccaggctggtcttgaactcctgacctcaagtgatcccacgcctcagcctgccaaagtgctgggattacagtgtatgtttttattgctgcataatgattgtacatatttatgggatatgtgtgatattttgatacatgcatacaatatgtaataaatcagggtaattaggatatccacctcaaacatttatcatttccttgtgttagaaacatttcaaatattctacctattttgaaatatacaataaattattaactatagtcatcctactatcctatcaaacactagaacttattccttctatctaaccatatatatatttttttgagacagtctcgctctgttgtcagactggagtgcagtggtgcgatcttggctcacggcaacatttgcttcctgggtttaagcaattctcctgcttcagcctcctgagtagctgggactacaggcgtgagccaccacgcccagcttatttttgtatttttggtagagatgggatttcaccatgttggccaggatggtctcgactcttgacctcgtcgtgatccacccacctcggcctcccaaagtgctgggattacaggcataagccaccgcactcggccctatctaagcatatttttatatccattaaccaacctctcttcaccactagccactcacttccgaacctctggtaaccatcattctactctgacctccatgagatcaactcttttagctcccacttatgcatgagaacatgccaagtttgtctttctgttcctcgcttatttcccttaacataattaacctccacttccacccatgttgctgcaaatggtaggatttcattctgtttatggctgaatagtattccattgtgtataaatccattatgcattgatggagacttaggttgattccatattttggctgttgttaatagtgctgcagtaaacttgggtgtgcagatacctcttagatatactgatttccttccttttggatatgtacccagtagtgagatttctggattatttggttgatctatgtttagtttcttgaggaaactctataattttttctatagtggttatactaatttacattcccaccagcagtgtactaaagtgttcccctctctctgccctcaccaagatctcttattgtttgtctttttgatagtggtcatttttttatttttattcatttttttgagacaaagtctcgctctgttgcccaggctggagtgcaatggcgtgatctcggctcactgcaacctctgcctcctgggttcaagcgattctcctgcctcagcctcctgagtagctgggattacaggtgcgtgccacgacgccaggccaatttttgtatttttagtagagaggggtttcactatgttggccaggctggtctccaactcctgacctcaggtgatccacctgccccggcctcccaaagtgctgggattacaggcatgggccaccacacccggccttactttttgagacagagtttcgccctttcacccaggctggagtgaaatggcgcgatctcggctcactgcaacctccgccctctgggttcaagtgattttcctgcgtcagcctcctgagtagctgggattataggggcctgccaccacacctggataatttttgtatttttagtagagacggagtttcaccatgttggtgaaatttgcatgagatttagaaggtggaagtgaagcactgccactattcttggaaggttttcatggatgagcaaatggctacatgtggcatgtccttctcatggccagtggcaaaagccaagtcataatatgaaagcacatgtaaagttctgttggggaccagcctcaacaccacctgtagggtacctgaagtccggtggcgacaaaggaatgagaagagacaggttaagagttcataaaggtgggagccaaggggccagagcaaatcaaaagctgcaaaggcgccaagctctggtctccacactatttattgagtacaatcacttagatctaagaagcagatgttcaggggtgaaacagtgaaaggggggcaatggcagtttaggtacattttctttgtgctgaagcagcataaacttaactactgatttattcttttacttatcagagagcagctgtggggagtgggcctaactagaagccagcatatctggccacattccaatgcttcaaaggagtgtctttctccttgagcacagtgtttatagataagagagcaggtcacactctggtcataggaacgtgatggcaattaggaggctttcctcctcagaggcctcttgtggctttccacaacttattgtcccatatttttatggccagtttatgcaggcactccacaagcccttttcccaacagttctaccaaaagtaacttccactcacattctattcgctaaatccaataaattgcatgttagaatgcatgttaacattatctattggttgtgttttgacaattttcttttttttttttctttttgagacagagtctcactgtgttgcccacgctggagtgcagtggcgcgatctcagcttactgcaagatccatctcccaggttcacgccattcttctgcctcagcctcccgagtagctgggactacaggcacccaccaccacgcccagctaatttttgtattttttttttagtagagacggggtttcaccatgttagccaggatggtctcgatctcctgacctcgtgatccgcccgcctcggcctcccaaagtgctgggattacaggcatgagccaccaagcctggccaattttgataattttcatccacatcaaataagaataaatatagcttattggccgggcatagtggctgcgcatgcctgtagtcccagctactcaggaggctgaggcaggagaatttttaacctgggtggcggaggttgcagtgagccaagattgcaccactggactccagcctgggtgtgtctcaaaaaaaaaaaaaatgaagtaggccaaatgtggactaataatgagaatgtgtaataaatcacatattatgaataacctacttttgtccaaagaatttatgaaatttacatgaaatattcccgttagaataaaaggaaactgatagcagttgttgcatctgtggaaagtgagtggctacagaactggatgttaggggagaattaattttcacatttttggtaatttttgaatttttataatgtgtgcttttattaaacaaaaaatttagaagattttaaaaaataaatgtaatgtcaaaatatatacgccagatactctttaatcccactgttgggaatctgcacaatagaaacaaaagaaggtaaaattagagttctaggtgaacattagaaacaacttcaatgtctgtagtaggtaatggcccaaaatacggacatacattccattctagaaatattctgaaccttacaaagaatgggttacatctttacgtactgacctggaaaagtattcatgattattatgaaaaggacaagacgctgtcaaatgtctgtatgggggtaaaagctcctccaaacacatgcaaaaaatgctttctgtgtacaggttgtttgagcataaaggaagaagaaatacacatactggttatctcagagatttgagggaagggaggaaattgttttcattttatttcactgtttcagtgaaatatttcactggtttcagtgaaacatgtaattttagaaaatttattctcaataaaaaaatttattctcaataatggttaatacaataactcagaaacagcattaaaatgagaccaaaatttacactttagttatccactttctcacttaaaaacatttgattttcaaggattatttaaataaataaatactaatgaaactggtggcttaccaactttttccttaaataaaacaaagacaatgtatatttccatcaacaaatttcatgatgctagactaggatggggagggaggagaggaaacctgactggcttctcgccagtatgaagagtctgatgtaagttaagttgtaatctatgattaaacgccttcccgcattgataaggtttctttccagaatgaattctctgatggtgtgagaagcttgaatgatagctaaaggccttcccacattccttacattcatagggtttctcaccagtatgaattctttgatgttgaataaggtgtgaatgaagtctaaaggccttaccacatatcatgcattcatgaggtttctcaccagtatgaattctctgatgtcttttgaggtgtgaacactgtctaaaagtcttcccacattccttacactcatagggtttctcaccagtatgaatcctctgatgtagggttagttgtaagccatcacaaaaagccttcccacattcatgacattcataaggtttcttgccagaatgaattttctgatggtgtgagaagcttgagtgatagctaaaggccttcccacattcccgacattcatagggtttctcaccagtatgaattctctgatgtatagtaagatgtgagcgatgcctaaaagtctttccacattctttacattcataaggtttctctccagtatggagtcgcaggtgttcagtaagttgaaagccacgaataaaagccttcccacattgcttacattcatagggtttttcaccagtatgaagtctctgatgttgagtaagctgtgatcgctgtctaaaggccttcccacattctttacattcataaggtttctcaccagtgtgaattctttgatgtagagtaagttctgagccataattaaaggccttcccacattcgttacattcatagcgtttttcaccattatgaattcttagatgtttaagttgtgagcaatgaacaaaggccttccaacattctttacactcattgcatttgtcaccattttgaattgtctgttgtttaaaaaggcatggtgtattaacaatttctgtgcattctttacattcagaaagttctttagaatgagttcttttgtggtgactaaaaaataaatggtaactgaagatttttctacactttttacattcagagattttctctctatcataaaattcttgagtgagtaaagtatgttggctaaaaatgggcatgttttcatggttaatcataagttgtctaaaataaccctcctcttgtccctgatgttgctcaaaatgacagttgccttcccagatagcgctgaaaattgatctctcaggactatggcttttaaattcttccatgttaacccactgggataattctgtttcataaatatccctttttggagataacttctggggctcatctctggatgccaagtctgaaagataagaaatatattttaactcctggttttgtactataagagaaataaaatatctatggtagcaatgagagataactgcaaataattcatataagaaataaaaggcttggagaactcttaaatgggtaaaggagcacagggaaatgagagcactcaaatgaagtagttaattagggaaataattcaatggtgctgaaattttgatccacctctgaattaccttgagagtttgttgcaattatggatgttcaggaaacattctaaatcaactcaatcagaatctaagagagttggtcttagaatgaggtcaactgagtcagagttcatatgtttaacactatcaggccaaaggtttatgcagcagattgtcagctgttgccaaatatctatttttttccctttttaaaaaatatcaattgaacccatggctttttatttgagaataaagctgccaatataaactctgcatttcccaagctctttcacagctgagaatgccatgcaactgggttctgcctaaagaaatacagaaatattatgtaataccatctgagttctttcgttaagagccaggtggcccacgccctatattgcctgttttccctcttcctcaacaaagctgatggcaatattgatttgctgtcatgtctatcaaataatggttttgcagagtagatacctttctagcttggattttaatgcgagagaaaattaaatttatatgcctgggttatagacattgtatcaaaaaaagaaaattaatttaaacatctatatggtttcaatcgctattgttctgggtctctgtcacaagcagcttaacctacaaatacagcttcccacagaaattttaaaacttcagctcctaggcatgagaatatagggcttctgctaaccaatataatctcattttgagtccaattcctttttattcattaagctataaccaaattaatctgtcaacaattaggacatgccaaagccttttcctatgttagagcttcatagcttcttccatgtgctaagaatctttttgcctagattttttgtatagcgggcttcatttcatctaagtctcagagtaaaagtcacttcctcagaattgtattcctgataatattatctaatgaagtccttcctgaagtactactggaattacatattcatttattaatctttttaatatttggccaggcatggtggcttatacctgtaatcccagaactttgggagacctaggcgggtagatcacttgaggtcaggcattggagaccagcctggccaacatggtgaaacctgtctctactaaaaatacaaaaattagctggacgtggtggcggatgcctgtaatcccagctactcgggaggctgagacaggagaattgcttgaaccgggaggtggaggctgaagtgagccaagatcatgccactgcactccaacctgggcaacagagtaagactgtctcagaaacaaacaaacaaacaacaaaatatatatatatataatatatatatatgtttttttacccataaagctactcaaggatagagaaatcactataaaaacaacctttacaatataataagtattcaataatcagttgctgaatgaatgaattattaaggaaaaggaattaagatgaagagaaacaatacaaagataacaattgacaatcataatcatttaatgcccttaaatttgtaataactactgaacatctctccatgcttctattcactcctacatcgactgcactgattttatatataaacacatacataaataaaccatgtacttgcttatctataacaagccactccaactgagtggcttaaaacagtaagtcatttattattattattactattgctgttgtaattattagtgaagaccaagtcatgctctgtcacccaggcgagagtgagcgcagtggtgcaatcacagctcactgcaggcccgacctcctgagctcaagaaatcctcctacctcactcagcttttggagaagctgagactataggggtgtgccactatgccctgctaatttttaaatcattttttgtagagaaaaggctctcactttgttgcccaggccggtcttgaactcctggtttcaagtgattctcctgcctcagcccctcgaagtgctgagattataggcacgagccaccacaccagacccatttatcattattgtctttcagtcctgaggattaactgagctcagccaggcattccttacttggcatttctctagtgacagtcacacactggtcaggctggatcattccaatggcttcctccacccacatgtcgggtaccaggcctgaggaaatatgtaaagcttgggactgtaacagctgtgatgcctggggctttctatccttatgtggtctctctacatggtgtgtccagcatagctgtttcaaggtaagagatgccctcttacctggcaactccagactccaaaagcatatggggaagtgcaggcagggagggcgggcatatgagcatatgccaggcacaagctgtctacttttatgacctagcctcagaaatcacaaagtatttctatttattggaaacaattcacttagggctgtcccattttcaaagcaggaagttagacttcttttttttttttttttggtttgaggactgtcacagaagcacagaagtggcagacatggtgtgtgtgtgtgtttttggtgggggggggtggggcacagagtcttgctctgtagcccaggctggagtgcaatggtgcgatctcggctcactgcaacctccgcctcctgggttcaagtgattctcctgcctcggcttcccaagtagttgggattacaggtgctcaccacctgtaatttttgtatttttagttgagatttttgtagttttagttgagatggggtttcaccatgctggccaggctggtctcgaactcccgacctcaggccatccacccgccttggcttcccaaagtgctgggattacaggtgtgagccaccgcactcggccagcggacatgtttacaacaaccactacactcatacacatacttatttatgtacagatataaacacaaacacacacttttctacatcacttccttacagacgatgtttttactaagtgaacatacctgtgaaaccaccacttaaccaagaaacagaacattaccagaaaccccaagccttcaaggcccttcccaggtttaccttacccaccaaaggtaggcgatatcctgccttcttacactatgcagtggtttttgtctatttctgaatttccaataaatggaatgatataggaggtacttttttctccagcatcttctgtccagtaccacatgtgaggttcatttgtaatattacaaatagtagtagtttcttaattttcattactatatagcagcagtactcaatgggtggtccaaggaccacagagggtacctgagaccctatcaggaagtctataaggtcaaagctattttcatactaattccgagacatttgccttttttacttattctcttaccactggacaggagagattctgagagactactagaagtgtgataacgtcacattctgaaatctaacagaatgcgtgattatgtatttctgtgtgttctagaagtttctagagtagtaggtttggggaataaacatgtactttcagaaattagctgactttgttaccagtacttctactgtactcttaaaaactgtatttatttatacctgcatttatgtctgtagcctcattattgtccaagaaattattgtgaaatccccaagttttccatgtacctacatggaaacaaaagaataaatacttcattttagaataatattttattatacaataaaaagagaatatctatttctttttctttttagacagagtttcgctcttgttgcccaagctggagtgcaatcacacaatctcagctcactgcaacccccgcctactgggttcaagcgattctcctgcttcagcctcccaagtagctgggattacaggcacgtgccaccatgcctggttaattttttgtatttttagtagaaacggggtttcaccacttagccaggctggtcttgaactcctgacctcaggtgatccgcccacctcggcctcccaaagtgctgggattacaggtgtgagccaccacacccagcagagaatatgtatttcttatacttgaaaatggatattggttttttgttttgttttgagatggagtctcgctctgtcccccgggctggagtgcaatggtgcgatcttggctcactgcaacctccacttcccaggttcaagcgattctcctgcctcagcctcctgaatagctgggattacaggcgtgaaccaccgcatctggctaatttttgtatttttagtagagatggggtttcaccatgttggccaggctggtcttgaactcctgacctcaggtgatcctcccgccttggcctcccaaagtgctgggattacaggcgtaagccaccacgcccagccagttttttgtgtttttttttgttttgttttgtttttgttttttttgagatggagtcttgctctgtcacccaggctggagtacggtggcgcaatctcggctcactgcggcctctgactcccgggttcaagcaattctctgcctcagcctcccaagtagctgggattacaggcacatgccaccacatcggctaattttttttgtatttttagtagagacggggtttcaccacgttggtcaggctggtcttgaactcctggcctcaagtgatttgcccacctcgtcctcccaaagtgctgggattagaggtgtgagccaccgtgcctggccaggtttattttttgagactacttttattattaaaaaatctggcctggagtggtggctcacatctgtaatcccagcactttgggaggctgagatgggaggattacttgagtcctggagtttgagaccagcctggacaacatagtgagaccttgtctctactaaaaaaaaataaaaatagaaatgtagctgggtgtagtggtgtgtacctgtggtcccagctacttgggaggctgaggtgggaagattgcttgagcctgagaggtccaggctgcagtgagctgtgatcactccactgcactccagcatgggtaacagagtgagaccctgtctcaacaacaacaaaaaagatctgttgtataaccctgtgcccacactggacaatactgcattgtacacctaaaattccattaagagggtagatctcatgtaaagtatttacaacacaagaaaattttttaaagtgtttacatatttaataaatacttttttctatttcttagcatacagcaccaatgtaaataaatattaattatagcatccacagttaaatttctcaatatttgtttttgagaaacactgagtattttttgagaaacactttatttcccactttattgagggaaaattgacaattaaaatttatatatttaaaggatacaacctgatgatttgatatacatttacattgtgaaataatcaccacagtcagctaactaacctattcatcaccttacatagttaactgttttcttttttttgtggtaacaaaaaaacatgtaccttcagcacgtttcaaatatacaatacagtactgcaaactagagtcataatattctggagtctgaatgtggatattcagaatccactcatcttgcataactgaagctttattttatttatttttttgagatggagtctagctctgtttcccaagctggaatgcagtggagcgaactcagctaactgcaacctccaccacccgggttcaagcgattttcctgactcagcctcttgagtagctgggactacaggcgtgagccaccatgcccggctaatttttgtatttttagtagaggcagggtttc[142 bp omitted]ttgttgttgttattgttgttgattgagatggagtttcactcttgttgcccaggctggagtgcaatggtgtgatctcagctcactgcaacttccgactcccaggttcaagctattctcctgcctcagcctccccagtagctgggattacaggcgtgtgccaccacgcccggctaattttttgtatttttagtagaaacggagtttcaccatgttacccaggcaggtctcgaactcctgacctcaggtgatccaccctcctctgcctcccaaagtgctaggattagaggtatgagctgccacacctggtcaaaattagactttaggaaagtttgtgtcagcccctgtgagcttgacagcttccaaatacttaaagacttacctgattagattcgtggtgttattaacaagtatgattttttggctattttataagaaaatgtgtcaaagtctggaagatctgcataactaattggagcaatattttccaaataactaatgcatcatgttacaaaacaggtaccacagataagagatccattcaaaaaacaagacagactagtgagttttaatttaatagattaaattcagaggcagatgtgagatccacgtgtcttcttttaatccaagcattaaagaaacgtgcaaaaaatgaaaaacattgccacttttcacaataactattttcgttttgttttggaaaatataacttatttatgttaacatatagtttattatttttaaatgaattaaatgaatatttcatttttcctagatttaatttctaagacagttaatattgaaggatataatctacatatgcaagagctcttggggttctcaatagtttttaagaatataaaggcatcctgagaataaaaagtttgagactgataactatatatagcattgcattctaacacaatttattttcccatatacctaatgatggacattctggttgcttccaatagttgactattatgattagtgctgctatgaacattcctgtacatttcttttggtggaaataattactcttttctgttaggtatgcacatcagagtgaaattgctgcatcataggatataaatttcttcagctgtagttgacattatgcaacaattttctaatttaggccaggtgtggtggttcacgcttgtaatctcagcactttgggaggctgagataggcatatcacttgaggtcagtagtttgagacctgcctggccaacatggttaaaccctgtctctactaaaaatacaaaaattagctgggtgtggtggtgggtgcctgtaatcccagctacttgggaggctgaggcagaagaatcgcttgaacccaggaggtggaggttgcagtgagctgagatgcgccagtgcactccagcctgggtgacagagcaagactctgtctcaaaaaagcaaaaaataaataaataaataacattctaatttaaaattccactttcaatttactttcaattcttttgcgtatatacctagaagtagaattgcttgattatatggcaattctatttttaatgttttgagaaattaccatactgttttccatagtggctgtatgatatagctcggatatgtgtcccctctaaatctcatgtggaattgtaatccccagtgttggaggtggggcctagtgggaagtaactggattatgggagcggttttctcataaatggtttagcaccattcccttggtgctatcctcatgatggtgagtgagttctcatgatatctggtccttgaaagtgtgtgggctgggtgtggtggctcatgcctgtaatcccagcactctgggaggccgaggtggacagattatctgagatcaggagttcaagaccaggttgaccatcatggtgaaactgtgtctctactaaaaatacaaaattagctgggtgtggtggcaggcacctgtaatcccacctactcgggaggctgaggcaggagaatcgcttgaaaccgaggtggaggttgcagtgagctgagattgcaccattgctttccagcctggacaacaagaatgaaactccgtttcaaaaaaaaaaagaaaatgtgtggcacctccccacgccccccactctctctcttgctcctgctttcaccatgtaaagtgcctgctcctgctttgccttccaccatgaataaaagctccctgaggccttcctggaagctgagcagggccatgcttcctataaagcctgcagaaccatgagccaattaaacctcttttcaaattacccagtctcaggtatttacagcaatgcaagaatgatctaataccttgtaccattttacattctcaccaatagtgcacaaaggttcaaatttctccacattcctggcaacacttgttatgttttttttttaaattaaccatcctattgagtgtgaggtgatatctcattgtgtgcttttttgtttgtttgtttttgttttcgtttttggttttgtttttcagactgagtctcgttgtcactcaggctggagtacagtggtgcaatctcagctcactgcaaccttcgcctcccaggttcaagtgattcttgtgcctcagcctcccaagtacctgggactacaggtgcatgccaccatgcctggctaatttttgtattttttggtagagacggggtttcgccatgttggccaggctgatcgcgaactcctaacctcaagtgatccacctgcttcggcctcccaaagtgctgggattacagtcatgagccaccgtgcccagcctcattgtggttgtgactagcatttccttaatggctagtgattttgaacatctcttcatgtgcctgttggccccagcagcacaagaagtatggagcagatcagaatagcagtgtaatggttctgaaaactaaactgtcattggaactaaagcctacaaaagtagatcagatctttactaaatctaacaggataactacttgctcaaattgattaaatagaatcaagactctctgaaacataataacgaaaatatccaaggtacaactgaaaatcacttctcataccaaaaaccaagaaaaccaaaatctgaaggagaaaaggcaatcaactaatgcaaatacaaggatgaagcacatgttggaattatctgacaaagactttaaaacatgcttcacaaaaaggctttgccaatcaattttaaattctcttgaaacagtatattttattatttatttatgtttttttttgagacagagtctcactcttggcgcccaggctggagtgcaatggcataatcttggctcactgcaacctctgcctcccaggttcaagcaattctcctgcctcagcttcctgagtagctgggattataggctgggccattgtgcccagctaattttttgtatttgtagtagagatggggtttcaccatgttggccaggctggtcttgaaatcctgacctcaggtaatccaccctcctcagcctcccaaagtgctgggattacaggtgtgagccactgcgcccggcctgagccaccacgcctggctgaaacagtgtactgtaaacttaaaaacttctaggagagtagatgttaaatgttctcccacacacaaaaaaataagtttataagataactattgtggaagaacaaaaaaagaagcatgtcaggtaacagatatgttaattagctagatttaatcgtttcacaacatatacatatatcaaaacatattgtagaccataaatacatacaatttgtatttttcaattaaaagtatttaaaaaataatctggctgggcgtggtggctcacacctgtaatcccagcactttgggaggccaaggtgggtggatcatgaggtcaggagtttgagaccagcctgaccaacatggtgaaaccccgtccctactaaaaatacaaaaattagccaggcatggtggtgggtacctgtaatcccagctactcaggaggctgaggcaggagaatcacttgaacccagaagacggagggtccagtgagctgagattgctactgcacttcagcctgggtgaaagagtgagactccgtcttaaaacaaaaaaattaaataataataataagaatccatgagtcaaagagggagtctcaaaggaaaaaattttcaaaacaactataagtacatatatacatcctttatatatatgaatatacagaataataacaccacatacaacttcatacttataacttcaacaaattagaagatatggacgaaatctttgaaaatcacaaactaccaatactctactaagataaaataggcaatctgaatagtcctacaactattaaataaattgaatttataattaaaaagctcccaaaaagaaatctctaggttcagacagttgctctggagaagtttactaaacattcatgtgatgttttacacaacgtcttccagaaaacagaagaaaagacaacacttctcaactcactttataaggccagtattactctgataccaaaacaagactagggtgacacaacaaagaaaatacaaatcaattatctttcatgaacttaaatgagaaaattgttaactaaattttagcaaatcaaatccaacccaacaatgaataaaaagcataatataccatgactaagtgggatttattctaggtataagaagctaatttaatatttaaaaacagttcaatgtaatatattatataaatatgataaataagaaaaataacatgatcacatcaatactcattcatattaaaaaaaaaaaaaacctcccagagcattagagaggggaactccctcaaccttataatataaagtatctacaaaattcctagagctggccgggc[134 bp omitted]atggtggcagacgcctgtagtgccagctactagggaggctgaggcaggagaatggtgtgagcctgggaggcggagcttgcagtgagctgagattgcgtcactggactccagcctggggcacaaagcgagactccgtctcaggaaaaaaaaaaaaaaaaaaaaaaaattcctagagctaacatcatacataatgttaaaagactgaatgctttcccttcaaaatggggaaaacacaggatgtccacttttaccacccttattcaacatagtattagaagttcttgccactccaataaggcaagaaaaagaaataaaaggcatagattatgaaataaaaagaaaattatctatttgtcgataatttgtttataagtaggaatctctaagaaaaaaaaactagtactaatatgcaagttgagtaagatcacaaaatataggattaatatataaaattaactacactccaatataaaaatgcaatgccatttacaaatgctccaaagaaaatgaaatacttaggtataaaactaacaaaacttgtacagattctgtatgatgaaaattgtaagatgctaataaaagaaatcaaggaaaacaaaaatatttggagaggcacgctgtgttcatgctttggaagactgaatagaataaaggtgttctctcttacttcatctataggcttaacacaattcccatgaaaatctaagcaaattttttgtagatacagacaagcttttctaaaacttatatggaaagaaaaaggtcctaaggatagccaaaataattatgaaaaacaacacagtgggaagaatcactccttccaatgttaaggtttactgtataactgcagccatcatgaaaggtggcactaaaagagagatggtcacaaagatcaatgcaacagaacagagaatgcagaaagagagccacacaaatttgcacaactaagttttgacaaaggtgaaaaagctattcacttgagaagggataacttttaaataaatgctatgggcatccatagaaaaaaaagaaccttgatctaaatttcacaactttacaaaaattaacacaaaatgaaccacgaacttaaatgaaaaatgtaaaactataaaatttctggccaggcacggtggcacatgcctgtaatcccagcactttgggaggtggaggcaggcagatcgcctgaggtcaggagttcgagaccagcctggccaacatggtgaaaccccgcctctactaaaaaaaaaaaaaatacaaaaattagctgggtgtggtggcacgtgcctgtaattctagctgcttgcaaggctgaggcaggagaatcacttgaacctgggaggtggacgttgcagtgagctgagattgccccattgcactccagcctgggtgacagagcaagactccgtctcaaaaaaaaaaaaaacaaaaactataaaatttctaaaaaagaacattggagaaaatcttaaggacctttgagtaggcaaacagttcttagacgtgacactaaatacacatacacacaccaaaaacacaattcataagagaaaagaagataaactagacctcatcaaaattaaaaacttttgctctgcaaagaccctgttaaaaggataaaaagacaaattacagggcaacccgctggggtccccttccatgctgtggaagctttgttctttcgctcttcacgataaaccttgctaccgctcaaaaaaagacaaattacagactgggagaaaatatttgcaggtcataaatccaacaaaggcattctgtctaagatacaaaaagaactttgaaaactcaacaatataaaactaaccaaattagaaaatgggcaaaaggcatggagagacatttcactaaataggatagacagatggcacacacagatgttcaacattacttgccattaaggaaattcaaaattaaaaccacaataagatataattacccacctattagaatggctacaatgaaaaacaattagaacaccaagtgctgactatgattagagaaactggatcacacatacattgccagttaagaatgtaagacggtacaaacattgttgacaataatttggcagctccttgaaaaactaaaaatggacttattacaccacccagcaactacactcttgagcatttatcataaacaaatgaagacttgttttcatgtacaagtttgtacatgaatgtaaaaaacaaaaacccatatatatgtgtatgtgtatatgaaataaaaggaaaaaagccattttccaaaggacaagtattgcaggattctatttatgtaacatttatgaaattacataattatacagagaacagaacagtggttgccaaggtgtattagtctgctctcatgctgctgataaagacatacccaggactgggtaatttataaagaaaatggtttaatggactcacagttccatgtggctggggaggcctcacaatcatggcagaaggcaaaggaagagcaaaggcacatcttacatgacagcagacaggagagaatgagagccaagcgaaaggggaaaccccttataaaaccatcagatcttgtgacacttattcactaccacgagaacagtatgggggaaagtgcccccatgattcaattatttcccacctggtccctcccacaacacgtgggaattatggcagcctacaattcaagatgagatttgggaagggacacagccaaacaatatcacaagggttaggaaaaagagaaatgggataagtatagctaacacaagggagtcttgtgaggtattgttgagtattttggctattgtggtggtgacacaaggctacatgtgataaaactgcatagagctataaatatacacacagaaatgagtgcatgtataactggtgaaatctgagtaagttctatgaattgcagcaatgtcaattttttggtatggtattgtactatagttgggtaaggtattaaccctgggggaagctgcaaagggggtacacaggactcccctgtacatttctttgcaacctcttgtgaatccataattatttcaaaataaaaagtctttttttaaagaaaattcatgccaaggaaaaggcctacccaggtataaaaaaactggtaaaggaatgttatctttacattaaaatatgtatgagaatatgtaccatttttccatgattcctctctattagtttcctagggctgccattaacaaagtcccacaaactgggtggcttaaaacaacacaaatgtattctctcacagttctgtagcacttgattgattgattgattgagacagggtcttgctctgttacccagactagagtgcaatggcagaatcatggctctctgcagccttgacctcccaggctcaagcaatactcccaactcagccccttgagtagatgggactacaggtagcatgccaccatgctaggctaatttttttttttctttttggtacagacagggtctcactatattgcccagactggtctcaaactcctaggctcaagcaatccttccaccttggccacccaaagtgctgggattacaggcatgagccaccatgttcagcctatagcacttcaatgaatcacagacatcatcaaagaactctagcctgtagaatggatctgcccttggtctatagcaccccaaactttcctggttgatctccttccttctcaatcatccctctgccatctctacctcctcaatatagtcatatattactttctctaactttcctaatttctgatcaacactatttttttgcctagtgattctattagaacatccatccatgtattgttgatcccctgttagattgaaaacgtctctataacactttaaaaatgtattcccatcacctagcaaagcaacttgtatggatcttttatctatttatttagagacagcatcttgcagtgtcacctagactggagtaaagtggtacaatcttggctcactgtagcctcaaactcctgggctcaagtgatctcccacctcagtctgctgaacatctgggactacaggcatgtaccaccatgcctggtgaatattttaatttttaattttttgtaaagacagggcttttgctatgttgcccagactggtcacaaactcctaagctcaagtaatcctcccacctgagcctcccaaagtgctgagattacaggtgtgagccactgagcccagcctgaatcttttaaaaaactaataagcaggctgggcacagtggtgtatgcctgtaatcctagcactttcagaggctgaggtgggaggattgcttaaggaggtcgagaccagcctgggcaatacagtgagacctcatctctgcaaaaaattaaaaaattagccatgcatggtggcatgggcctgtagttccagctactcaggaaacttaggtgagaggattgcttgagccagggaggcagaggttgcagtgagctgagtttgcaccactgtactccatccagcctgagtgacagagtgaaaccctgtctcaaaacaaacaaacaaaaattaataaacactatagattgtgtcctttgatgtacagaagtttttaggtttgatgtagtcccatttgtctgtttttgcttttgttgccagtgcttttggtattatacacaataaatcattgccaaatccaatgtcatgaagcttttctccaatattttctacttagagttttattgctttagctctcacatttaggtctttgatccattctgagttaatttttctatatggtgtaagacaagggtacaactgtattcctttgcctgtggataatccaattttctccatggaagtgttggcacccttgtctaaaataatttgactatttatgcaagggtttatttctgggctttctattctattcctttagaatatctttttttttttttttttttgagacggagtctcgttctgtcgcccaggcgggagtgctgtggcgcgatctccgctcactgcaagctccgccttccgggttcacaccattctcctgcctcagcctcccgagtagctgggactacaggcgcccaccactgcgcccggctaattttttgtatttttagtagagac[140 bp omitted]ctttgtaatatgttttgaaatcaggttttcccaaagtttggtttaaaataaacttgccagcccaacattctgaccagctggcctgctctctgcaagagcttcctgtgcttgctcactcacctgggcaccatcttcctgtctcttccctcacaaccatccagggctccttcccttgctccaatgaggagattacggctggcttagaaacagaaagtcctagttataagaaaagaaattgagatgagatggaaatgaatgtatccaaatacagtgatttagaactgattaaaataaaaataaatcacagataaaaatggtacttgataagggatacagaggaaataaaggagaagagatgaaacactcatattcagatgaacacaggatcataacaaacaaagcaaacaaacaggcgataaaatagtacttaaatttatgtaaggtttctcttttttgctgtgaggaaaaaaaagaagcttcttgagatatttattcttttttttttttttgagatggagttttgctcttgttgtccaggctggagtgcaatggcacaatcttggctgactgcaacctccacttcacgggttcaagtgactctcctgcctcagcctcctaagtagctgggattataggcgcacaccactctgcctggctaatttttgtattttagtagaaacggggtttggcccatattggccaggctggtctcaaactcctggcctcaggtgatccacttgcctcagcgtcccaaagtgctgggattacaggcatgagccacagcacccagcctcctttttttttttaatgttaactgtacaaagttctttaaaaataacttccaaaggcaaatcacttaaaagagagtacaggtcaggcgcggtggctcacacctgtaatcccagcattttgggaggccaagacgggtggatcacttgagatcaggaattcgagaccagcctggccaacatggtgaaaccctgtctctactaaaaatacaaaaattagctgggcgtggtggcgggcacctgtaatcccagctactcaggaggctgaggcaggagaattgcttgaacctgggaggcagaggttgcagtgagccaagatatgccattgcactctagcctgggcaacaaaagtgaaactctgtctcaaaaaaaaattaaaaaggccaggtgcggtggctcatgcctgtaatcccagcactttgggaggccgaagcaggtggatcacctgaggtcgggagtttgagaccagcctgaccaacatggaaaaaacacatctctactaaaaatacaaaactagccaggcgtgttggcacatgcctgtaatcacagctactcgggaggctgaggcaggagaattgcttgaagctgggaggcagaggttgtggtgagccgagatcacgccattgcactctagcctgggcaataagaacgaaactccgtctcaaaaataaataaataaataaaataaaaagtgaaagattacatttattataggaaatggagtggtgctcatttgagaatagtaaatgaacctttattactccagcctatcactctattacccaggaaagaaaaaagcttcactcctggaacccatgtgtctagttttaatcttatgctagtacactagcagatttagcacagtggaagtgaaacaaaagacagagtctgctttctttgacagtgttatgctttaacattgcagatttccaattctgccccttaaacatcaaggaggagttattataagaaaggaccaaaagaacgtgtaaggatggggaaaatgaaaatgtacctccatttagctgtgctggtttctacaatacataaagagaaaattcatccagttatttgaaagctagccctaaattaataggggggaaagcagaaattccaagaagtagattgtgaattgttagcggaattctgaattgtcaggttcttaatttttagataactttaccaagtgacaccaagttgctataattctccaacatcacctccttgtacaaattcctctgcgctgggttcaggcattcccattcctcctgagagacatctatagccacatctctgaacatcaccaactcctaaaatgacaaataatagtactatttttgaaattataagaaatgtttttaaaaagaaaagagaagtgctaaaagaaggtactgcaaggaaggagacagtctactgaatatataggctaagcctgggacatgggtcaaagaggaatttagtgtgactgaagcggagtgcccatatgttcttaaacaattcattttctgcagacacatcttcttgtgtaggtgggaaactcctgttaatcagtcatctcaaaactaagaaaataagtagaggctcccaattaaattaaatagtcaaaaacttttaaatctttccaaaatgtcttattaaaatctctatcttgagaaaaagaacttgaagatttttattcatgattatgactatcatgccataggcatttttagttttcctgcaaattctttagtacacatctggtgcagactatattttccatagatggacactgctgtatcttgcatcccaaatattcttcttcagtgtaaccttgacatcccccttccaattggcgtaaaggtctgtgcccccttctcttgaacctgaaaggacatctgtgacttattcaacctatagaatacggcagaagtgattatgtgacttctgtggttagatcacaaaaacgtctcatacttctgccttactttctggggatgttccttctggaaacccagccaccatgttcctaggaagcctaacaagctctccatgggagagctcatgaggaaaggaaccaagcctccccaaacaacagtcagcaacagcttgcaaaccatgtgagggaactatcttgaaagtgggtcatgtagttcccaatcagaccatttcagctgataccacatggaacagagctgagcgatccctactgagctctgctcagattgtggatttgcaagcccaaccatgattgttgttttaatctactaaattttgggttggtttattatctggaaatagttattgtaactgtaatatgatttttattggtagcataacattggtagcataacatttttaagagacagggtctcactatatttccttggctggtcttgagctcctgggctcaagcaatcctcccaccttggcctcccaaagtgctgggattacaggtatgagacactgcacctagcctcatttaatcttacaacaagagatttaataattctcttaaacttgaatctctggagtgaacaaaatctctacggtattttctaaggtacatattccattgttttgcaatcacacctgagaggtcttaactgttatcatccaccacctctccctgtatatttactgtgttcccaaagaatattaatgtagaatgatccagactctcatagatgtggcccaagtctaacatatgctgttcaatctaaaaccggagtttgtaattggtgatcatatattttctggcaagatctccaatttttccatgcaagcactaatcctatctccatctaattctaaagcctcacacagcaaagtctctctgctcagtgagatcatccaacaccaattcctatcacatctcactggaaaatcccaaattgtgaatttcaaagatttcccacgtgtgatttaattaaccattcattccctgaggacacctcaagtggtggctttttttttctcccacagccttcgtaccactgtcatccttgtttctcattgttggtgtcagacaactgtctttccttctctaaaatcttttttttttttttttttttttaagcagaatatcactgttgcccaagctggagtgcagtggcatgatctcagctcactgcaacctctgcctcctgggttcaagtgattctcatgcctcagcctcccgagtagctgggattacaggtgcacaccaccgcacccggctagtttttgtattttttgtagggatggggtttcac[131 bp omitted]tcagtctataccatgtattatccctctctgttgcagtgatgtgttcacatgcaggtttttgcccctcaggaattttagctcctggctcagtatcactaactctaatactactaatctttattttcagtgatttcaaatgctgaaaacaaaacatcttcaaaacctatgattctatacctagctaaaatcctttaaaatgaaggtgaaatagttgatttttttaaaaaaaaaaagacaaacaaaagctgaaagaatttgtcaccagaacacctatgctacaaaaatgtaaaaggaaattcttcaggtggaaaaaaattgatactagataaaatcttcagtctatatagaagaataaagagtgttagaaatagtaaacataggggtaaatacataagctactcttttcatttaatactttctttaaaagataatcaactaaagaaagaaatatatgctttaagcaaatttagaaataaaatatatgacaataaaaaagatgggaaggggaaatagaagtatccagttgtgtctggcgcagtggctcaccccagtaagccactgcagggaggcaggattgcttaaggccaggagtttgagaccagcctgggtaacaaagcgagatcgcatctctacaaaaaaatttaaaacattagccaggggtggtggcacacaactgtagtcctagttacttggaaggctgaggcaggaggatcacttgagcctaggagttcgaggctgcaataagctatgatgacaccactggaatccagcctgggaaacagagcatgacccagtctctttaaaaaaaaaaaagagtacccaattgtaatatgtttacattatacctgaagtgttctaaaatgacttgaatagtgtaaagcacattgcaaaccttaacccctaaaacagcaaaacaaagagatatagcaaataatcctatagtgacgataaaattaaatactaaaaaaataagattaatccaagacgaggtaggaaaacaggaaaaaaaatttaaaaagaacagatgacaagatggtagagtaaaacctaactatattgctaattacattaaatttaagtggtcaaactacagtatattccctgatttattttatagagccagcattgccttgacactaaaacttaaaaattaattaaaaattaagatgaaataaagtcacttttacataataaaatctgagagaatgtgtcaccaaagacccaaactacaggaaacactaagggaagatcttcaggctaaagagaaatgatacaggatggaaactcagatcacaggaaggaaggaaaagcaactagacattttttcctgttttccaacacatataatttcttatctttgtaaattctttccacatttccaagtatttcttttttatttatttatttttttgaggcggagtttcgctcttttgaggctgtagtgcaatggcacaatctcggctcactgcaacctctgcctcccgggttcaagtgattcttctgcttcagcctcctgagtagttgggattacaagcatgtgccaccacgtctggctaattttgtatttttagtagagacggggtttctctgtgttggtcaggctggtatcgaactcccgacctcaggtgatccgcccgcttcagcctcccaaaatgcagggattacaggcatgagccaccgagcctagctatttccatgtatttctaattcatatattttaactctttttggtaggagcattcaaagctatgatttttccttagggtcctgctttttaatttaatttaatttttttgagatggagtcctgctttgtcgccaggctggagtgcagtggcaggatctcggctcactgcaatatcctccccgccgggttcaagtgattctcctgcctcagcctcccgagtagctgggattacagatgcgcaccacgacacccagctaatttttgtatttttagtagagatggggattc[131 bp omitted]ttcttgtttcaatatgcaatgctatcattgattactaaaaattctttacttttagattatatttcctctttgttcccatacttattaagacataatttataaacttttgataaaattagctttatttctctgattttattattaaattctagttgtatttcactatattcaggcaacattatcatttctaattactggatattactgtggcctcagattttgtcattttttagtgaatgttccacagccacttgaaagaatgaatattaacaattatcaggataccaaatttaatatatatatcaataatatagatctgatacagtatgtgatttagtacttctatttccttattaaattttgtctacttggcctggtttggactgagaagagtgaattaatgtctcttactgctggtaagtgtctatttcttctatctgctctaaattttactttaggaggtaatgctatgatattcaatatatattcagaactgttatatcttcattttgaaatttatactttaaaagtatataatgtctttctgccatgtttaattctgtgatgtggcctgaatcttacttagtctgttttctttattctgtctttttttgtagagacagggtcttgctatgttggcaaggctggtctaactcctgtcctaaagcaattctcccgccttggcctcccaaagtgctgggattatgggcataagctgccatgcccagtcctgttttcttttcattctatttgcctggtatagttgttcgcccatccttttcttaacctttctaaatcagtgaatcactcaggtgtctgggtttttctttgtaattcaatctgaaaggtcttttaatagatgagttaaaccccatttgcatatgttaataaggtatatatgtttgctctctggtcttaactttattatgtaattttttttttttttttttttttagacagagtcttgccttgtcacccaggctggagtgcagtggtgtgatcatagctcactgcagccgcaaactcctgggataaagtgatcctcccacttcagcctcagcctctcgagtagctaggactacaggtgcacacaaccacaagcagctgattaacacaaattttttttgtagaggtggagttttattatgttgcctagactggtctggaactcccagactccagcgattctcccacctcagcctctcaaagtgctagaattactggcgtgagtcaccgtgcctggcttttatcatgtgattattttgttaattctgtcttgctcactctctctgcatatatctgggaagtcttactatacataagttattttctgtctctcactaccagttaagcttcagaagggaagatatgtatgtatgtgatatttttttccccactgatttattccgttacctagaagaatgcctgtcacatagtaggtactcaataaatattcgttaatcacctcatcaaatcaaagttctgacaagagaaacactaatattttcttcaaaacaatattatttgtgttctctccttgtgtctgttaaaagatttcacgtaagggagatgaagaatcatttattcaacaagtatatgaacatgagttggagatgagaggagcaaaaatgaaggccctgaaattctggcaccgtcacttactcactagtaagttattgtataattcccaggtaagaaactatgtcagaataaataatgcaggccaggcgcaggggctcatgcctgtaatcccagcacttcgggaagctcagatgggcagatcacttgaggccaggagtttgagaccagcctggccaacttggcaaaaccccgtatctacttagagtacaaaaattagctgggtgtggtggcacgtgcctgttgtcccagctacttgggaggctgaagtgggagaatcgcctgaacctgggaggtggaggctgcagtgagccaagttcgcaccactgcactctaaccttcccacctgggagacagcgaggctatgtctcaaaaaaaaaaaaagcaaatagtcacatgccctatacaaaaaaaacaaaaacaaacaaacaaaaaatcaagtattgtaattaggagcaagaaaaaaccaacttacatgggccatgtcttattttagaattgaatgtattatttaatcctcttcttcgttccctctggaagaaactcaatccaaagaaggtgttgctgggagagaggggagttaaaaaaaagacaggagattattgcctctaagctcccaaaatgttaattcagaatgacatttttcttcccccttcatatctcctattcccagacctgatacatacatacataaattattagtgggaatttggacaaatcctagctttactcaaaaccatgaggaaactcagctacagcaggatagactcaagaaaagcaaggatcatgcccttcagcagaagggatagttaggccagcccattgtcccaatactatgatgaaatcgaagccaggatcagggtgctgagaactgcactgggtagattttcactgaattaagaggaaaaagaaaaggtaatgaacattatgagaaaagattagggaaacagaaaacagacccaaaagacccagtgtatgtgtaacagaaatttcaaaaatagaggctgaaacaacacagatggaagagaaaaaataaatagaacaaaaatttgcagaccaaaataaattcttgagtctttagtttgaagtacagtgctgtaagaattaaagaagaatcatacctggaaacatcctgaaaaatattcttaagtttgtctttgaatacagacaaaaggacataaatatcttttagtaagaagttgcagaggccgggcgcggtggctcacgcctgtaatcccaacactttgggaggcagatgcgggcggatcacgaggtcaggggctcaagaccagcctggccaacatggtgaaatcccgtctctactaaaaatacaaaaattagctgggtgtggtggcggatgcctgtaatcccagctactcgtgaggctgaggcaggagaactgcttaaaacccgaaggcggaggttgcagtgagccgagatcgcgccaccgcactccagccacggtgaaagagagaaacttcgtctcaaaaaaaaaaaaaaaaaaaggaagttgcagaacaatgtgtattgtggccaaatctcagaaaaaaaaaatcaaacacataggtacataagcatactacatatgtggtgtttttctgaggctgtaatgataaatgcggggtagcaatgtgattttcgcttgtgttgtgtgtgtaaatctacagctaactcctcaagtagtcaggaaaggatgagagatggatgaatgacagatctctggagtggggcgtcctgagccttagatgtgtgcacaggagcggggtgaggtgaatgtgcgtgtgtctgtgtgtgagagaccagagttgactgagaggagtggaagctctctgcctgatcgtgtgagcctgaggataacgtgaatgtttttttgtttttttttttttgagacagtttcgtttcactcttgttgcccaggttggagtgcaatggcgcgatctcggctcacagcaacctccgcctcccgggttcaagcgattctcctgcctcagcctcccaaggagctggaattacagacatgcaccaccatacccggctaattttgtatttttagtagaggtggggtttctccacgttggccaggctggtatcgaactcccgacatcagggcatccacccgcttcgggctcccaaaatgctgggattacaggggtgagccaccgctcccggcctgtaaatgtgctttttctttcacgtaaataaatgagatttacacaaatagccattcacaatcatggtcacagtcacctacaaaccccatttacacaaatgatcaggcacacaatcacactgtcactaaagcacacccacgcaccaggtcgctgtcccaacagtaacacacagcccaaagagaaaccctacttcctcacgcattcaaaacacacccacctaagggctgatcccgcactcagaggcctaaaactatagacattcccttccgcggcactggtgagccaggatttcttaccttcagcattctcagggaaggctctggtccaagctctgattcggattccaagcgaagccacacgcccagctcttccttctccaccggcccgggacatccttacctgcctctacccggagaccattcctgcgaggctcctaccggaagtagctgtggacagcagtgtcctctgggaaatgcagtccgaggggagagcgcctggggtggagcgggtgtgttccgccgggctccgggatgcacttgcgcagtttcacccgaggctggagtgacgccaacctgttaatgttcgttttcggattctggacttcgggttccgctgaggacggatttcggaataggcacagtggctgccccgaacccctcaaggcggcctccgcgggctgtggctgaagataattttcggcgggcgcggactaacccggcttccctttgtggagttgtggtgagaaaggtgttttgttgtgcgcgtgtccgaaggtgactccggaggagaaggtggatatgaactgacggtgagggtgtagcgcgtgagatttgtatgtgaaacgatttaaaaaaaaattttttttttggccgggcgcggtggctcacgccaaggcgggcggatcaccgagaccagcctgaccaacatggagaaaccccgtctctactaaaaatacaaaattagccgggcgtgatggcgcatgcctgtaatcccagctactcgggaggctgaggcaggagaatcgcttgaacccgggaggcagaggttgcggtgagccgaggtcgcgccattgcactccagcctgggcgacagagcaactccttctcaaacaaacaaacaaaactgtatgtcatatatttgactccatttatttatttatttagagacagagtcttcttgccctgttgcccgggcaagaaaaaacaaacaacaacaacaacaaaaaactgtacgtcatatatttcactcaactttttttttttctttttttttttttgagacggagtctcgctgtcgcccaggctggagtgcagtggcgcaatctcggctcactgcaagctccgcctcccgggttcacgccattctcctgcctcagcctcccgagtagctgggactacaggcgcccgccacctcgcccggctaattttttgtatttttagtagagacggggtttcatcgtgttagccaggatggtctcgatctcctgacctcgtgattcgcccgcctcggcctcccaaagtgctggattacaggcgtgagccaccgcgcccggcctctttttgagacagggtcttcatgccctgttgcccaggctgactgcggtggcgcgatcctagctcactgcagtctccacctcctcagctcctcccgcatccacctcccaaagtgctgggatagcaggcgtgagccaccgggtcaggccaaaacgatttattttatttttatttttttggtaaagacagggtctcgctatgttgcccaggctggtggtctcgaactcctgggctcaagcgatcctcccgtctcagtggccaaagtattggatgacaggtgtgagccaccgcgctgggtggtgaaacggttttgaggctttttgagaatggctgttctatatgcccgcgtggggctcatgcggcgagcgccgccactcccgcagtggcccctgtgggggtgatacgtgatgtggcttaaatgtgagaggccacctggacccgtgtgattgccacgtttgcaggagcgcagccacgtgcacagggatcttgtgacattctgtgtgaggctttttgcgctgggtccacccatgattagaggactagtgtgactgtggcggcccctgagaagggaagaagctggttgcgaccaggaaggtctgagatggatgaatgacagatctctggaccagggcgtcctgaaccttagatgtatgcataggagcggtgtgaggtgactgtgtatgtttgtgtgtgagagtccagagccgacttagaggagtggaagctggcacatgttatctgccagaagggacagatccatggtaaggatttttaaccttgctgagagaccagtaactccatcaccaagtgtaatatgaggaaatggtgcttgtttgagaacaagtgattctgcttgtgtctgattctcattcatgtatgtgagatggtttgcacttgaaactgtcagtgagagagaaagtagagtgaaatatatgacgtacagctggccctccctatccatgggtcttgcattgtggattcaacaaaccttcagttgaaaatatctgggaaaagaagttgatgtttgcatctgtactgaacttgtacaggctttttttcttgtcattatgccctaaaaaatagaatataacaactatgtacatagtatttacatggttattaggtgttataagtaatctagagagggtttaaagaatatgggaggatttccatagattatatgcaaataccgtgttcattttatataagggacttgagcatctgtgtatgttggtggggaggggtcctggagggacactgagggatgactatgtgaaagtggtttgcgaatatgctcaagtctctggatgaattgtatgacagtgaaggggtatgtgattagactgttgtggctttgaggttgatgtgtatgttttaaaggattatgattgagttggagatcatgtgagatttggtgtgtttaaatgtgacatgaattaaaatccgaatgaaagattgcgaagttatatgaatgtagtaactacataagagaatgcaggtatctgggacccatggatacgttacagtggggaaaataaataatcagacctttcagggattacttttcagggtagtttggtggcagcactttgtataaggaaggcaaatccatatccatagtgtctatttcagtgagaaaaaagcagtccgatgtaaccaacctgccaccagagaatggtgtcatgttgggactcagtgttggtctctgcacagtcactctaataaaagccgtaggtcccttttggaagactgggagaaagattaacagtataaatttctggaagtatactggtgctcttccttaaggggacctggcctcccctttgttcaagggcttctgggtctcttcactggctcaagtctgggtattcattgagggacactgactttctgtctttatgaatcaagttatacttttgttcacttgacctagaagtcttccacttacacaaatcaattaactctttagtagatttcctatctatttaacttccatcaaagaatatcagccatcttcccagacagttaccctgtaacagatattttctttgaaatgttctttcatggccattttgcattctttatcacaataaattattgtttcatttttattaaattgttttaaattagacactggctctgaactgacctcaattccaggagatccaaaacatcactgtgatctaccagtcagagtaggggcttatggcagttaggtgatgaatggagttttagctcaggtctgtctcacaatgggcacagcaagtcccagaagcattctgtggttgtatccccaataccatacacataattggactaaatctacttagtaaccggcagaatccccacattgattacctgacctgtggactgagggctgttatggtgggagaggccaggtggaagcgactaaaactgtctccacctagaaaaatagtaattttttttactatttttgtaaatagtaaaaatttactatttacaaaataatagtaatggattcccaccccatcaccattcaacttgcctatttggccctgcagaagacaaatgggtcttgaagaatgacactggattatcataagcttaaccaggtggtgactccagttgtagctgctgtaccaaatgtggttttgttgcttaaggatattaacacatcctctgctacctgatgtgtagctactgaattggcaaatgcttttttctccatccttgttatttaaaaccaccataaatagcttgctttcaattggtaaggccagtaatacgctttcactgtgctgcctcaggagtatatcagctctccagacacatatcgtaagttagttcacagggatctcgattgccttttccttccacgagatactgcactgggccgggcgtggtggctcacacctgtaatcccagcactttgggaggccaaggcatgtggatcatctgaggtcagcagttccagaccagcctggccaacatggcaaaaccccgtctctactaaaaatacaaaaattagctgaacatggtggcatgcacctgtaatcccagctactcgggaggctgaggcaggagaattgcttgaacccaggaggcagaggttgcagtgagctgagatcgcaccactgcactccagcctgggcgacagagcaagactccgtctcaaaacaaacaaacaaacaaataaacaaaagatactgcactgatccattacattgatgacattacactgattcaacctagtgaacaagaagtagcaagtactctagatttattgttaagacattgcatgtcagaggatggaaataaacccaacaagaaatcaggggccttctacctcactgaaattcccagaggtcgggtggtgtggagcatggtgagatatcccttctaagatgaagtataaattgttccatctggctcctcctacagtcaaaaaggaggcacaatgcaaagggggtctcttcggattttggaagcaacgcattcctcacttggatgtgttattctgctggccatttaccaagtgatccaaaaaactgttagtttacagcggggcccagaacaaaggaaaactccccaacaggaccaggctgctgtgcaagctgatgtgccacttgggccacatgatccaacaaatctaatggtgcctcaagtgtcagtagcagagagggatgccgtttggagcctttggcagggcccagcagaggaatcacagtgcaggccctgaggattttggagcaaagccctatcttcctttttagaaaacgactcttcagaggcagcttttggcctcctactggaccttagtagagactgaacatttaatcatgggccacgaagttaccatgcaacctgcactacccatcaggaaatgggtgttacctgacccaccaagtcattaaattgagtgtacacagcagtactccatcataaaatttaagtggtataaatgtgatcaggcctaagcaggccctgaaggcacacatgtgaagaagtggcccaaaagcccatcgtcccccctcttgctacaatacctttctctcccagcctgcactcgtggcctcatggggagttccctatgatcagttgatagaggtagagaagactcaggcctggtttacagatggttctgcatgatagacagataccacctggacagcgctacagtcctgttctgggacatccccaaagaacagtggtgaagggaaatcctcccagtgattggaactctgagcaccgcacctggttgttcatttttcctagaaggagaaatagccagatgtgacattatataccaactcatgcactgtagccaatggtctggctggatggtcaggaacttggaaggaacattatttaaaaactggtgacaaggaattctagggaagagatatggacctcgctgaacaggtaaaaaatataaagatatttgtgccctatgtgaatacttaccaaagggtaaccttagcagaggatgtttcataatcgggtgtataggatgacccattctgtggatatcagtcagcctctttaccaagctacccttatcatcacccaattggctcatgaacaaagtggtcatgatggcagtgatgaaagttatgcatgggctcagcaacatggacttctgctcaccaaagccaaactggctacagctactgctgagtgcccagtctgctggcagccaagaccaacattggctccccaatatggcaccattccctggtggcaggctgatacattggattgcttccatcatggaaggggtagtatttttttcttactggaatacacactttagatacaaatttgccttcctgacacaaaatgcttctgccaaaactaccatccagacccttaacgaatgaaggtttgggtcaccccaccagttaaagaaccacaatcagctgaggagctcgcttgctgagggaaaaaggaatacataatggataatggaagaaggtaggtatgaataccagctataaccacgtgagcagttacagaaacaaagactaattgtcatgaatgtgtcttctttattttataatgaatgtgtatacaacacagctttgttttcatccctttcatatctctttatcatgtacagtatgatatactgactttatattagagtatttaaatattgttaactttatatcagtttttaagttatgggatatcagggagaagcattaacatcatccagactttgcatcctcttctggggaagtgttagttatttttggttttatgcaggatagttgtatcatgttaagcagaagtataaccttgttactgcctttattcagatatgaagtatggttttaggagatgcttatgggtaccaagtcgacaagggtggacttatgatggttaattttatgtgtcaacttgactgggccatgatgcccagatatttggtcaaacattattctggatgtttctgtgaaaggtgtttttttggatgagagtaacacttaaatcagtggactctgaataaagcagattacgctccacacaatggatgagcctcattcaatcagctaaagttcttaatagtacaaaggctaatgtctgagcaagagggaattgtgttagcagactgcctttagacttcgaatcacaactgttttctgggtcttcagcctgctggcctgccttgcagattttggacgtaccaaggctccacaattgcatgagccagttccttaaaataaatctttctgtgtgcatgcatacacacagacacagacacagacacacacacacacacacaccctgtttgttctgtttctctagagaaccttaatatactatcctaagtattttacatgtatagtgtcatttaactcccctcagaaccctgagggagttattgatacctttcccggtaaactgatgatgcaggtgaggcatcaagagcttaaataacttgtaaaatgtcacagagttcctaagagaaggaactggaatttgaatttcaaagtcctcagtctttaactattagattaccattttctaacttgacaccttctattctatatcccacccgcttcacaaagccattcctgatgagtgccaactaatttggaatgaaaatcattaggattatgggttctattatatgatatttaacacactgtttattctcaaacatttttatttactaattattatcaggaattcttcaatggcattcttgtaatactatttagttcatttttataattacttcctaagagacaaattgtcctagaagtggggggtttctgagtaagacactggcatgcctggcaacatgcaagaccttgtgcttcaatacttggaagaagcacaaattactaagatataattgctgcttttgtattgcttataattcaacaggggaaataaaagtaagtcaaaggtagagcatgacaaagacttctagagaagtacaggtgataaccctgggagttcccaagaattcataggagctctgggtgtgaatgaatgtcctctcgtcatgtgtatgccttacagattagagtctgttgatgttgggtctaaagggtactaatggagcaaggctgtcctcttactgatagcagggcattatggctaatatttcggaagtgaaataaatccttctgtcaagaaggcatagaaaacaaagcagcaagtccaaggtaaggtttaaacctcctagctcttcttccctgggcagaatacccacagtcatagttgggtccaaattaatattttttttaacataagagaaataattcatcacatagtatttagaatatgcttagctgtaaatctaaagacttcttaaagcttttttttttggagacagagtctcactctgttgcccaggctggagtgcagtggcatgatctctgctcactgcaacttcttcctcctgggctcaagcgattctcgtgccccagccacccaagtaactgggattacaggcatgcaccaacatgcctggctaatttttgtatttttagtagagatgggtttcaccatgttggccaggctagtctcaaactcctggcctcaagtgatcagtccacctcagcctcccaaagtggagggattataggcgtgagccactgcagccggcctaaaagcttttttaatctactttttgaaaatcttccatttaataaaatgccttaaacatacattctaaaatcaacagatgtttcttgcaaagaaaatagcaagtatatgtaacaagtatacttaagtttaaatttataaaagtatatttaaaacaaaaaatcagtatcacagcctattaaatgttaaatgttaaaggtataccttggctgggtgtggtggctcacacatgtaataccagtactttgggaggctgaagcaggaggattgcttgagcccaaggagttggagaccactctgggaaacagaatgtgaccccatctctacaaaaaataaaaaattggccaggcgcagtggctcacgcttgtaatcccagcactttgggaggctgaggcagacagatcacaaggtcaggagttcaaaaccagcctgatcaacatcgtgaaaccctgtctctactaaaaatacaaaaattagctgggcgtggtggcgtgcacctgtaatcccagctactcaggaggctgaggcaggagaatcacttgaacccgggaggcggaggttgcagtgagccgagattgcaccacttcactccagcctgggtgacagagcgagactccgtctcaaaaaaataataaaaaataataataaattagccaggtgtggtggcatgtgcctgtggtcccagctacacaggaggctgaggcaggaggatcagttgagcccagcaggtcaaggctgcagtgagccatgttcacgctgctgcactccagactgggtgacagagcaagactctgtctcaaacaaaaacaaaaacacccagtatacctctatagatatttttatttctattgctgatgtctggcattctatttgtatgtatatgtacatgtatctgtatgtacatatgtacactttgataaatggcatagctgtacatataataacctactgtagccactgtcagcatgttttggatttgtctatatttttctattattctacacctttttttttttttttttttttttttttttgagacagagtctcactctgttgcccagggtggagtgcagtggcaccatcttggctcactgcaacctctgcctcctgggtcaagcgattatcctgcctcagcctcccgagtagctgggattacaggcacctgccaccatgcctggctaatttttgtatttttagttgagacggggtttcaccatattggccaggctggtctcgaacctctgacctcaagtgatctgcccgcctcaacctcccgaagtgctgggattacaggtgtgagccactgcacccaaccaacttttttttttttttaactgatcacttaacagttcgttctgaggaagttctggaatttttaaactagtatattcctgctagactcaaagctgaaccatgccagagaaattccttccatatgctgcccagctgctatgtataccccaccctcccatttccctcagggtcctgtgggacttactttcagtggcaaaaagcgtaattacttttgcaccaacctaatagatttggagtgtttttgtcatttgcaggactgtcacttcgagggataaccatcaagttctccaggtgcagagtgagtggctgaaccctgcttaaagggatgtaactataaggatgtgatgtcagagcctagtcttgctagttaagaataatttcggtggctcgcgcttgtaatcccagcactttggaaggccaaggttgggggatcgcttgagcccaggagctcgataccagcctgggcaacatggtgaaacttcatctctatttataaaagtaaaagatagggccgggcgcggtggctcatgcctgtaatcccagcactttgggaggccgaggtgggcagatcacctgaggtcagaagttcgagactagcctgaccaacatggagaaaccctgtctctactaaaaatacaaaattagctgggtatgatggtgcatgcctgtaatcccagctacttgggaggctgaggcaggagaatcgcatgaacctgggaggcagaggttgtggtgagccaagaccatgccattgcactctagcctgggcaaca[141 bp omitted]gaaaccctgtctctactaaaaatacaaaaaattagcccagtgttgaggcgggcacctgtaatcccagctactcgggaggctgaggcaggagaattgcttgaacttgggaggcagaggttgcagtgagctgagatcatgccactgcattccagcctgggcaacagtgcgagactctgtctcaaaaaaaaaaaaaaaaaaaaaaaaaaggccaggcatggtggttcatgcctttaatcccagcactttgggaggccgaggcgggtggatcacctgaggtgaggagttcgagaccagcatggccaacatgtcgaaaccccatctctactaaaaatacaaaagttagccaggcatggtggtgcgcgcctgtagtcccagctacttgggaggctgaggcagaagaatcgcttgaacccaggaggtggagtttgcagtgagctgagatcatgccactgcactccaatctgggcaacagagtgagactccaactcaaaaaaataaataaaataaaaatttttaaagaatattttcctttattatttataatctgcttgctgggagtattttctttcattgtgagtctcttgagagccttggaagaactgatctgacatttttatagctgcaaacactcaactgtgtttttattattgaggcttcattttcttgacacctaaagtgactttatcttcctctgtctcatattttcctctccctgaattgacatcaccacaacaggcctaagtccaatttcttttcctatatacaggaccttttatctctaagccagatgtgatttccccattgaagaaaaggagatagccgtgaatgtgtggagagtaatgtgttaaggtggctcaaagaagagggaagccattgcagataaatgctcagctgatatgaagagtcaaaacttcaaggtattgtttgagaaacttttccctcagtggccagtggagagaactgaggtcccttcagtctgagttcccaaagacacctcaccatcatgcctctgtgtcagtgtgcccatagctccttctataattcttccagttttaaggagggaaggattagccttatagagtttctaattataaaagaaatacacactgagcattaaaattaagaaaacagagaatcctattccacatagcaaaggaaacaataggatgaagagacaacccaaagattaggagaaaatacttgcaaatcatatattggataaggggctaatattcaaaatgtaaaaggaactcacacttcttaataacaagaatacaaataactggccgggtgcggtggctcacgcctgtaatctcagcactctgggaggccaaggtgggtggatcatgaggtcaggagattgagaccatccttggggttaggtgaaaccccatctctactaaaaaatacaaaaaattcgccaggcgtagtggtgggtgcctgtagtcccagctactcaggaggctgaggcaggagaatggtgtgaacctgggaggcggagcttgcagtgagccgagatcgcccactgcactccagcactccagcctaggtgacagagtgagactctgtctcaaaaaaaaaaaaagaatacaaataaccctattaaaaatgggcaaaggacttgtatacatttctcaaaagaagacatacaaatggccagcacatatacgaaaaatgctaaac[140 bp omitted]tggtgaaaccccgtctctaataaaaatacaaaaaattaaccaggcatggtggtacgcacctgtcgtcccagatacttgggaggctgaggcaggagaatcgcttgaacccaggaggtggagattgcagtgagccgagattgcatcactgcactccagcctgggcgacagcgcgagactccatcccccccaaaaaaaccacagtgagatattaccgtgcacctgttagacacctgctattacaaacaaagatgaaaggttagtgttggtgaggatgtagagaaaaggaacactgttgcgagcactgtaaattactacagccattttgggaaacagtgtagagcttcctcaaaaaacaaaaaatagaattaccatatgagccagcaaccccacaaggaattgacatcagtatgtcaaagatgtctgcactcccatgttaactgtagcattattcacaataactaagatatggaaacaagctaagtgtccatcaatggatgaatggattttttaaatggaggatatatacacagtggaatactattcagccttaaacatgaaattctgtcatttgcaacaacatgggtatacctagaggatattatgttaagtgaaataagccagacacagagagacaaatactgtatgatctcacttacatgtggaatctaaaaagttgaactcttagaagtagagagtaggagggtggttaccaaaggttggggggtggggatgtggtggatggggaaaggggaaatgctggttaacaggtacaaagttttgtttagataggaagaatacattctgctgttcttttgtccaacacagtgactatagttactgtattgtatatttcaaaatagctaaaagataggattttatatgttcttaccacaaagaaatggtaaatatttgaggtaacggatatgctaaccagcctgatttgatcattccatcatgtattgatgcatacaaatatcacattgtaccatataaattatacaattattgtacaaatatatacatcaatatacaattgtacatacaatacatacaattgttgtacaaatatatacaattattacttgtcaattaaaaattttaaaaaagaaatctgaaataacagttgccccctatgagcatctcacgataaatccctttaatctcctctacatatactgagtattaaaaaacagaatcgtctagaacattgttgctgttctgagacctgtctttctcatttaacacaagtgaacatttttctttgtcagcaagtagcggtaaacatcatccattctaatggctgtattttttaataggtggagttgtatcttcagggcagattcctaacagtggaatggctgggtcacaagggaaatgtgtaggtagtttttgtacatgttgtcaaatttcccaccataagggttgtgccggtttgttttcccaccatcagtgtatgagactgcctgattccctgtacattcattcctgtggctgctctaacaagttaccacaaacttggtagctttaaacaatagtttactctctcacattctggaggccagaactccaaaaatctagacatcagcagggctggagcgctcctagagattctaggggagaagcctcactttgcctctttttctggtggctgtagccattccttgaccattccttgacattcctggccccatcactgagatttccacctccggggtcacattgctgcctcttcttcctctgtctgccagtctccttgtgtctcttttaaggttgcttgtcactggatttaggacccaacccacccagacaatccaggatgaactactcatctcaaacttcttaatttaatttcatctgcaaagaccctctttccaaattaagtaacattcacagtttccagagattaggacatggacatatctttttgcagggtcatcagtcagccgactatatcctgtctcaccaacagaatacattgttatattttttaatttttgtcatcttgataggttaaaaatggtctcagtattccccctctccccctgccaagagacagggtcttgcttgttgtccaggctagagtgcagtggtgcaatcatagctcactgtaatctcaacctcctggcctcaagcaatccttccacctcaggctcccaaagcactgggattacaggtgtaagccacctcacctggcctgtctccatattattttaatttgtatttctctttttacacatttaagggtcccttttacatattttttgtgaattgttaatttctcttacccatcttttctgtcaggtttttgggtctttcccttgacattaagaggagttttgtttctttgagacaaggtctcacgctgatgcccaggctggagtgcagtggtgcaatcacggctcactacagccttgacttccagggctcaagtgattctcccacctcagcctcccaagtatctgggactacaggcacacaaccacacccagctaattttttgtatttttttgtagaaatggagtttcaccatgttgcccagcctggtcttgaactcctgggctcaagcgattggcccaccttgtcctcccaaagtgctgagattacaaggtgtgagccactgcacctggccaagttttcttttttttttttttaattgggaattgttatagactgatttgttcccccccagttcatatgtttaatattattaactatagtcatcatgttacacaacagaacaccaaaacttattcctctcatataactgaaactttgtatatactgatcaacctaactcctaatttctagtagtataagacttaagacatacaaccagatatatgtagagagagtgaacaagagggaagtaacaaaataattacatgataaagggtgggtgctatggctcacacttgtcatcccagcactttcagaggctgagagacagggggatcacttgaggccaggaattcaagatcagcccggggaacatagtgagaccccatctctataaattttttaaattgtctgggtgtggtggtggtatgcacctgtagtcctagctacttggggagctgaggctgaggtgggaggattgtttgagtctaggagtttgaggtggcagtgagctatgatagtgtcactgtcactctagcctggagtacagaatgagaccctgtctcaaaaaaaaaaaaaaaaaaaggttaaattacaagctactactatgtacagcaacatggatataatgttatctatatgtatctatatacttagaaataatgttgagcaaaggaggtcagacacaagagtacatactatatgattccacctatatgaagttcaaaaccaaaccaaactattctattatagaggtcaaactaatggttaactttgaggtataatgattgggaagagatatgagggagccttctgggatgttggaaagtttctatgtctgtaatggcggttgcatgggttttttttttattattttattattattattattattattttttttttttgagacggagtctcactctgccgcccaagctggggagcagcggcaccatcttggctcactgcaagctccacctcccaggttcacgccattctcctccctcagcctcccgagtagctgggactacaggtgccctccaccacgcccagctaattttttgtatttttagtagagacagggtttca[140 bp omitted]aatttgtgcttcctctctctctctttgtgtgtgtgtgtgtctgtgtgtgtgtgatttcatgtgttcatttcttttactcactttttctatcgggtttttgggtctttccctcgattttaagagttttttgtttttgtttttttgaggcatggtctcactccaacgctcaggttggagtgcattggcacaatcacggctcactacagcctcaatatccttgggctcaggtgatcctcccatctcagcctcccaagtagctaggactacaggtgcaccaccacacccagctaattttttgtatttttagtagatacggggtttcaccatattgcccaggctggtctcaaactcctgggctcaagtgttccacccgtctcagcctccgaaagtgctgggattacaggggtgagctatacaccctcaaaataaatggcatatctgcatttttaaatcacatttttctacctacaaaaccaattttctttcagttctggtttttgtttctgaagcccatattttattacactgaatgaaacctgtgcatgggtaattcatttaaataaatat[135 bp omitted]tggtgaaaccccgtctctactaaaaaccaaaaattagccatgcgtggtgacatgcgccttgtagtcccagctacttgggaggctgaggtgggggaattgctggaaccttggaggcgggggttgcagtaagccgagatcatgccactgcactctagcctggcaacaagagtgagactctgtctcaaataataataataataaaataaaataataataaaagactaatgataccatatagtagcgaatagacattctcatagtatgttgaatattggtgcaaacttaatcagggcaattgatatagatgtgtaaacaggttttaactatgaaaacctcattctcagcaaaatatctaagactatccaaaatatacaattcacatgtgcacagaaaaggcatatgcagtaaaacattgcatataatgggaaaaagctggaaagaacttacatatacaaacagaacagtgcagccattaaaagattatgacacagttcataatttagtgacatgaaaatttgttcactatattttgttagaagaaacaagtagatttcaaaacaattgttatataaccctgttttgaatgaaaaagtcctataagcctatatccatgcacttattcacaaatgaggtgaagtgatttggaataaagtgttcaaagtgctttactttaagctttttttaatattctccaatcttctgaattaagaatctactaattttacaatgagagaaatctgctttgagagcagaaaaaataataataaaaggagatatgtgtatgatacatggaatgcaatgttgaaatggtctgaattctggctgaagagacccaaactttcttcatagacattccagagcactaattcaaatactgccttaaaggtcctaaatctagaatcctaagattttatacacaacgagttcctcttatcagttgcctctcatttacctgggcacagaactgctgttaaccaacctcttcacgaactattgctccaagaaggaaatcacatctggtttggacataaattaatagggtaattaataataaacccttcacataggcaaagaaatggaattttggtctgatgtggctatggagaattgagaccattccttaatcatcaagcagaaagaagtcaagaaagtattctgaaggattaggatgataacactttagaaataacacaggagagacgcccatttccaactctaggaatcttaaaccagtccttcagaaagttacctaagaaccctgaagtttccctaatcaatcagggtgaagaaagtaagatgttcccagaatacagaatttgaactggaaaggggaaaacagatgtaaaaagggagacccggctggccgaggtggctcatgcctgtaatcccaacactttgggagactgaggcaggcagatcacgtgaggtcaggagtttgagaccagcctggccaacttggcgaaaccccatgtctactaaaaatacaaaaattatccggacatggtggtgggcacctgtagtctcagctactcggaaggctgaggcaggagaatcccttgaacctgggaggcggaggttgcagtaagtcgagatcacgccactgcactccagcctgggcgacagagcaagactcggtctcaaaacaaaaaaaggggagaccaaattggctagttaaataaatgtatgtaggtgttatatcacacccctgaataattcctccgaatcggggtgggggtgtcagtcatctgtactccacccagaagtcaatgccacattcctgagtctacatacccgtgaaatgataggaacccatgtgcccataaggtcctggaggggaatgcaaagttggtcaagacatgggagctagacagcaaggaaaaggaattgcaaagggaagttagtagttaaataagttaccacatatccatgtaatataatactaagatagacaaatgcaaagttgtagaaaatagttaaggaatattttcaagatactgtatcagagaaatcactttacaaaacaggttgaacaatacaattatatcaatatggtcatttaaaaagtctagaaagttaaacacctgtttcagttatttattgctatataaccacctcaaaagtttatggcttaaaacaaaaaacaattagcttattatttggggggcttggcaatttgggcttggcttgcctgagtggttcttctgctgatcatattcatgtgacagctgtcagctgttggcctggtggaggctggatggttcaagatggtctccctgaaatttctggccgttgttgctcactggacctctctctccaagtgatctttaatgcgcaagcaagttgctcttagccttcagtcatggtggtctcagggcaggaaaaggggaagagaaaaagctgcaagacttcctgaagctttgtctcagaagtctcacaatatcacttccaccacattctattggtcaaagcacctcacaaggccctgcctaatagtaacctaaccactgactagcatttcaggaggagaaaaaatactcccttgctgaaaaacaaaatcaaagagaacaaaaatagaaaatacaacaaaacttccttgaccttggttttcagatatgctcagcaatggttccctttcctcagggctcttagagaacctcaaggcaagggagaaggggtaaggaatcatgagacatcagacctttcttggaacccagattggctaaattggaaaaaattattgccaccacacgagctctcatcatctaccataaacatactcagatggaagtaaaagggagatgggagtactgctaacccttcttagtattcaagggaaaggccagggtcactgatatccaggactggggactttctcaaaattcacgttaagtctcctgcggagacagctctgggaatgatgtggatcacatggaacctgacctctgagagttcccaagggagagcctctgaggaaggaatcctactcctaggttctccccacgacgtcttcccagaactctgcttaagggacacttacaactcgaaaagcctcgttccgaaaacaggtctgtcctttttctgtttgcagattttattccaccactcgattatcccttccctttttgatggccatttcactgcagctggggtctatacagctataaagcgggagaaaaaaggaagctgggaactcagagatgcagagcccaagaaacaatcgagtctaaaactgccgcttaggtgggcactccgccaggatcccctgtgtcaaacaccaggctgagaactggggacaggtgtgccctgagaagacaacgcgggccatgcttcattgcaagatgactctgcttaacataggcatggatcatagtcctcacaggcacattggggagatcttcgacagacccctcagtcccaacattaaacacagcactgcagaaatgaagctttacccgttacacacacaacaccacagacctaaaaggctcttccatcacacggccacagcagcactgtcatgatggaaggtctcaaaccctacagtgtcacacacccgacagccgaccacggccacccaaaggtcccgcatccgagcagggacaggaacacaatcacgcacctgtcgcagcctcctcgccgcgcacaccgccgccttgtcctggcatcaaacacacacgcacaggtgcatacacaggcccgagctacggccctgcacaccctgtctgcgtcccgggagctcggggcttcctcaccgtgagcgccgccctcatcccagccacgcactatgagaatttggaaggggaaccagagatcaaagttcgaaaaccgcccgggcgcctgtgggaaatgtagtccaaggccggaaacgcccggatgtggagaaggcgcgcgtagccggtggacagcaggaacgcgccgcggagacacctgggaggcatcgtccgcgtgggagtgcgcatgcgcagacgcccggccggcaaccgaaggtgaggctggtgggtcccgcgggcgcggagaaggcgggtgacggtgtgacccgtaaggaaggctgaggagggaggcgggagcctgggctggggaaagcaagaagggaagaggagcaacctgggacgaggagttggctggaggaaagtgcgagtccgggcctcagagaaggctgggagggaagcaggaaccagagcgcgggcccgggagcacctgaagaagggaaccggttgcccgaggcggggggtgagctccccagtggcaggaatttcgtctgattttcgtcccctggctcctggagcacggcctggcacacaacaggcgctccgtgtgtgtgtgtgtggcttttcgtacctgtcctgtgtgttgtggtaggggaatgtgttattctgtgtgacgttgtggaaccggttgtttatgaaagtgatagggtccctgcgtgtcttaagttttaatttaaattagatgcgagtcgatttgtgtttgagcctgtgtccgactctggagaggcgacagtgagggcattgtgagtgaaaggttgttactttttgtagaagttctgtgaaattgtgcacgacgtgggggcctatgggattatgactatgtagtgggtgatacagctatgaatatgcctaattttaaaagtatttggtgtacacgacctatgatgactgtgaatgtggcacactgtgtgacttaggtggagtgcttgagaaaccgagtgttgactaaagtatgcattgtttagattgatttatgagtattgggcattttatatatgcctgtagaatttgactctggtaattagacaagtaaaataagtagtgattttttttttttaatggagagg[135 bp omitted]taacatggtgaaaccccgtctctactaaaaatacaaaaaattaaccgggcgtggtggcgggcgcctgtagtcccagctacttgggaggctgagtcaggagaatggcgtgaacccgggaggcggagcttgcagtgagccgagatcgtgccactgcaatccagcctgggtggcagagcaagactccgtctcaaaaaaaaaaaaaagattgggcccatgcgcggtggctcacgcctgcaatcccagcactttgggaggctggggcggacagatcacctgaggtcaggagtttgaccagcatggtgaaaccccgtctctactaaaaaatataaaaattagctgggcatgatggcgcatgcctgtagccccagctactcgggagctgaggcaggggaatcgcttgaactcggaggtggaagttgcagtgagccaagatcgcgccactgcactccagcctgggcgacagaacgagactccgtcccttcccttccaaaaaagatcatttattgggaaacctggtattgactgatgactgatatgcttaaatgaatagaataccactgggaccacacagaaaaaaactttatctcataactgccactctcaaaattcctatttgagagtgtgtgtgtgtgtgtgtgtgtgtgtgtgtgtgtgtgtatttatttttttttttgctggatgaatttcttctgctggaagcctgaaatgtgaaaggatacatgattagtttcttctctaattccccaacctttattttgtctcctctttactccctataggcagtctttagctctcatggattgggagctgggaaaggaatgagaagacagaagtcagagacaagaagaggctaacatgactgataccactataatttagtgtaagtcatctcttaccttccaagagaacctgctgcttggaacctccagatacacttcccttctcatgggcatagcctcttctccagctgctgccccagtgcttcctctgggcattcagtggcccaccgactctggtgggtgggtttgtccagtcattcctctttgataggacccaagacaacccagacagcctccacccatggggtcttcacctagtgctaaggtgagaattagccacctcagtcactttgccctcccaaatcttagaaatatgtaaaatttttgccaagaattctctcaccactttggttcctggtggcctcagggtctgagggaccccttgtgtgttgtaaaaaagggagaatcactcacgtttttccccctggaaaaacactgttctaaaaataacagtctcttaaaaatacatgctcctctctcagcctctccactgtctttaaaggaggagtttaatgatagcaaaattttacactcaacagctctataagatcctgttcttgaatgaagttctcttagaattttgtttcatttgctatctttgggatatcagctgaggctgaggcagaaatatttctaagttttcatcctattaaaaattgaacagtgataacaattagaaaactcagggttgttggaaaaaacattaacaaataaatagggggtgtgtgtgtatgtggaaagtatggggaaaaagacttatttacagtggtcatcaaaaataagagatacaaaggaagtgactttactaattacatgatatgttattaaagagcacattttaaaataggacttttggtggggcttggtggctcatacctgtaatcccagcactttgggaggctgaggtgtgtgcactgcttgagtccaggagttcaagaccagcctgggcaacttagtgaaaccctgtctctacaaaaatacaaaaattagccaggcgtagtggcacgcccctgtggctagctactcaggagactgaggtgggaggatcacctgagcccagggaggtcgaggctgcagtgagccgtgatcacaccactgcactccagcctgggcaacagagtgagactttgtttcaaaacaaaacaaaagaaactataaaactcttaggaaaaaacacataggcatacatcttaatgatcttaaatttggcatgcattcttttggagtttctttcatggtgattgaaatgttctaaaattaggttgtggatgattgttcattatgatggtttgtgaatataccaacaaccattgaatcgtatactttagatggatgaattttatggtgtgtaaattatatctcaatgctgtcatttaaaaaatcttggctaggccacctctgcaatgtgtaacactgagcaagccatgagtgtctcctgtgttagtcatgttagtcaatttcaggtataataggacctacctcactcagggtttttgtgagggtcattggatctacatcacagggaattattttggaaagtgtaaagaaataattgaattccaaatatccaagagaaggaaactggttggattaaccaagtacagtgccactgaggagtattatgcagccatgaaaagggatcagttgcatggatttatggagaagggcctccaggatactttggatttttttgttttcttgttttgtttgtttgtttctgagacaaggtctccctccgttgcccaggctggagtgcagtggcttgatcatggctcactgcagcctcgatctccctgggctcaggtgatcctcccacctcagcctcccaagtagctgggactacaggcatgtacaaccatacctggctaattttattttattttatttttgtacagttgggggtcttgctatgtttcctaggctgttcttgaactcctaggctcaagtgatctgcccaccttggcctcctcaggtgctgggattataggtgtgagctaccttgcctggcctccaggatactttgttagtgacaaaagcaaccgaatattatattctatcttttatctaagctttcagcttatcctttcattattttaatataagcaaatgtatatatttggatttttttaaactcatgtcaccaccatcacccaaatttaaaaagaaaacaaaaacagaacacttctagcccccatccaatcaccctggcacagaagtaacctctgttgtaatttcatctcatataaaaggagtcatgcagaatgtagccttttgagtctggcttcattcagtaaggatgttgcaattagtaaactgtagctgggactacaagtacatgccatcatgctggctaatttgtgtatttttattttgcagagacagagtctcactatgttgcccaggctggtctcgaactcctgagctcatgcaatcctcctgccttgtcttcccaaagtgctgggattacaggcatgagctcagttcagttgcatgttgcaattcactcatattattgcatgtatcattgcttcattcttcttagtataaagtagtattccattgtctggatggatcacagttggtttgtctgtgtatccattgatgcacacttgggttgtttccagttctgaggtggttatgaataaaactgctacgaacattcacattcgggtctttttgtagatacatgtctttgtttgtcatggatagatactcaggagtggtattgatgggtcgtttaaacaattactttaaaatggtatctttacatggaatagttttgcctcttgattgtggtggtggtgacacaaatctaaatgtgtgataaaatggtaaaaacacgcacataatgaatgcatggaaaactagtgatatctgaaagaagttggtgcattgtgtaatgacaattttctgattttttgtttttattttttagagacagagtcttgctctgttgtccaggtcgaagtacagtggcacagtcatagttcattgtagcctcaaactcctgggcttaagtgaccctcctgcctcagcctcctgagtagctgggactacaggtacacgcccccatgctggctaatttgtgtatttttattttgtagagacagagtctcactatgtttcccaggctggtctcaaactcctaagctcatgcgatcttactgccttgtgctcccaaagtgatgggattacaggcatgagctacctactgtgctcaaccagttttctgattttgaccatatgctatggttatggaagatgtgaccattgtggagacgctaggtgaaaggtgaatgagacctctctgcactatttttgcaagcttctgtggatctataatcatttcaaaataaaaataaataaattttaaaaagagcctgctgcaagactgagaagtgcctatggtgtctgattccctgtcgttgggcatggattctgtttcctactctgggcccttttggacaaagccatgcagaatatcttatcccatacctgcccctgtgagccacttactctttctcaaagttttcagcaaccctgggagtaggcggtatgtggtggttcacacctataatcccagcactttgggaagccaaggcaggaagatcgcttgagcccaggaattggagactagcctaagcaacatagtaagaccccatttctaccaaaaaaaaaaaagttagccggtcttgatggcatgcgcctgtagtcccagctacccaggaggctgagataggaggatcacttgagcccagtgaggccgacgctgcaatgagcggtgataggccactgcactccatcctgggcaacagagtgagaccctgtctcaaaaacaaaaaaattaaaattaaaaaataattagctggatgtgggtggtacatgcctatggtccctgctatgcaagagggagaattgcttgagctgaggaagtcgaggctgcagtgagccatgatcatgccactgtattctagcctaggcaaagagtgagaccctgtctcaaaaataaaataaaaataagacttgaataaaaggacaggaagacacaacatgataaaatgtcaaaacttccttacatttcatggatttccattaaaattttaataaaaatgtttgaactttctagcattgttaggagaaaataaacaccaaaaattctgagagagaaaaactgtcaaggaagtagccctagtagatactaagctgttttaaaactgataactgtaaggtgatcctggcaattaaatgaacagttcagtggaaataaatataaagcccagctctacttagatatatgaaggacataaaatatgtgataaagatggcagttttgatgattgaaggaaatacagattctggagtactttgtgataccaaactagatggccaaataatttttaaaattgtatttttacatagaaaaaaaacagtcaaatgagaaactataaaaaattatttggggccgggcacaatggcttacgcctgtaatcacatataggaggagcacatgaggccaggagtttgagaccagcctgagcaacattgcaagaccccatctcaaaaaataataataatttaaaaaattagccaggcatggtgatgtgtgtcttttgtcctagctacttgggaggctgagacagaattgcttgagctcaggagtttgaggttgcagtgagctagaatagtaccactgtactccagcctggatggcagagtatgacactgtctctaaaagagaaaaattatttggaactcctaccacaaaaataaaggattaatttccttcctttaaagaagtctaacaattcagaaaataaaaatgatagaaaatgaaataaatgatgagaccacagataagaagctaaaagcgttctttaaacttatgaaaagaagcttcttgttcatggtaagaaaactagaaactagaaccacaatttacatgtgttagatagacaagcataaaaaaatttgtatcagtagtattcctcagtgtggaatgacaggtattctcatatattgctggcagtactatgaatggtacagccttaacggagagcagcttggaagtagttaataacagtaggctgactaggagagaaaaggtagtgcttgaggggagaggagcttgcccaaaatccatcctgctgccccaaaagcctgtatctctggccttggggataaaacagaatttgcctagctggttgtcccatctatatttatgtggcatgttcagagtggacaaggatcaatacaagggaaatggaggcaattttaatagaattataagagctgtgaggcacatgtggtctcatgtggctttttttgtctcggctttgcctccttaggaactgcctcttttctaaagaggactccaaaggaaggactggtcatctctttcatatctcaaaaccatggctcaggtaaggcgatggtttctctctcctttctgaaagtcttttttttttttttttttaaggatatttgggcatgtgtcggtcttgtcctacatcctcctacctatctttcccttcagaaaactggtcctcacttcttcccatattggtcagataagactctaccttccacaaatgctcccaattttaaccaatgttgacacattaagtggataaatcaggccaggcatggtggctcacaccttaacagcacttcgctcccagcactttgagaggctgaggcaggagaattgcgagtccaggagttcaagaccagccagcctgggcaacata[140 bp omitted]catggtgaaatgctgtctctactaaaaatataaaaattagctgggcttggtggcaggcgcctgtaatcccagccagttgggaggctgaggcaagataattgcttgaatccaggaggcagaggttgcagtgagtgaagattacgctgctgcactccagcatgggtgtcaaagtgagactctatctcaaaaaaagaaaaaaattagcccagtgcaggtgcagtggcatgcacctgtggtcccagttatttgggaggtttaggtgggaggatggcttaagcccagaggtcaggtctacaatgagccatgatgtcactgcacttcagcctgggtgacagaacaagactctctttattaaaaaaaaaaaaaatagtggatatatcattcaccatctcctctctcagtcttcttccagaagctatgcagggacaaaaatgcatttccttgaactaaatgaaaatgtattactgaatgaacctgtcttgtgtagattaaaaaaatatataaggctttattgcatccacagactggagtcaagatggtagtgaaattgacagaatttatatagaattagtaagtagcaagaagtcttgtgttgaggctttgaggatggaaacgtgattggcaacttgtacaaaaaactgagaatcttgtgtttcttctctaccttcagttttgctcacagctgctaacaatttctaaaaatctgtggccttccaataacaccttcttagtatattaattgtattctagatttatttctattttcacatttcttccaattttatgtttgcatgtagaagtaaatatatttgtatagactgccatactaaactagaagtgtaactcctaaaatattctgcttctggtttcaaagacactactctttcttgtttcagtcagaacatttatcttcgtatctggacctcttaaatactggtgttctccagattctgtattggttctcttctatttacactctcctgttcactacctaccactattattctaatgctgctcaagtaattttgattctaaacctctgtcttttttgatgtattgtcgaaactatatatccagcctccagctagatatcgccacctacatgttccgcagatccttcatgcacatgtctgagattcacctcattgtctccttctgcccatcctatccttttgtttttttccaatctggttagggccccaacccctacccacctgccaatacagccaacatgagttaaaagtctcccattcactgcaaaactattgagtggtaaattctgttcctcttaccacagttccctccatcctccactgataccatccttatttgggttcctttctcatagtggtcacttgtcttcccatttaacatcttcacttattttccacttctccaagggctcaccccaatgcttgcttacatatttttgttttctgtgcttttgtgtttaactttttattatggtaaaatatacataacagagagcttaccgttttaaccattttttagcgtataattcaaagccattaagtacgttcacaagttgtgtaactgtcaccactatctatttccggaactgtttttcttcatttcacatagaaattctgtaccaataacactaaacagttactcccaattttattctttatagcatcagatggaaagtgccttagaggaatgtatatagacatttcattaggagacaagaaaatgttaaaatgcttataacagtttaaatacgagaataataatcattaatgctaatagagttttccagttaatgaacatgatgcacatctccttttatttagatcttccttaaattctctcagtaatgttcctttcagtgtaccagtcttgtaaatgttttttatatccttggatattttttaatgctgctgtaaatggtgttcatttttatttaaatttcccactgtttattgctagtatgtgaaaatgcaattgatttttttatcttgacctgcaacctttcaaaactctcttattctagtaattttttttttgttagattcttaggattttctatatggacaatcctgtcatatgtgaataatgactgttttctttctttctaatctatattcccttcatttctgtctttccttactacattgtctagaaccttcagtacaatgttgagtagaagttctaagaacagactttcttgtcttgtgcccaacttaggcaaaaggcattgtttttcattattaagtttgatattagctataggattaggatttttttttctttttttttttttcttgagacagagtcttgtcctgtcatccaggctggagtgcagtggtggatctcagcttactgcaacctctgcctcccaggttcaagcgattctggtgcgtcagcctcccacgtagctgggattacaggcatgcaccaccatgctggcctaatttttgtatttttagtagagacagcatttcaccatattggcgaggctggtcttgaactctggcctcaagtgttctgcctgccttggcttccccaagtattggcattacaggtgtgagccaccatgtccggctggaatttcttttttttttttttttttattatactttaagttttagggtacatgtgcacaatgtgcaggttagttacatatgtatacatgtgccatgctggtgtgctgcacccattaactcgtcatttagcattaggtatatctcctaatgctatccctcccccctctccccacccgacaacagtccccagagtgtgatgttccccttcctgtgtccatgtgttctcattgttcagttcccatctataagtgagaacatgcggtgtttgattttttgtccttgtgatagtttacggagaatgatgatttccaatttcatccatgtccctacaaaggacatgaactcatcattttttatggctgcatagtatttcatggtgtatatgtgccacattttcttaatccagtctatcattgttggacatttgggttggttccaagtctttgctattgtgaatagtgccgcagtaaacatacgtgtgcatgtgtctttatagcagcatgatttatactcctttgggtatatacccagtaatgggatggctgggtcaaatggtatttctagttctagatccctgaggaatcgccacactgacttccacaatggttgaactagtttacagtcccaccaacagtgtaaaagtgttcctatttctccacatcctctccagcacctgttgtttcctgactttttaatgattgccattctaactggtgtgagatggtatctcattgtggttttgatttgcatttctctgatggccagtgatgatgagcattttttcatgtgtcttttggctgcataaatgtcttcttttgagaagtgtctgttcatatcgtttgcccactttttgatggggttgtttttttcttgtaaatttgtttgagttcattatagattctggatattagccctttgtcagatgagtaggttgcgaaaattttctcccattttgtaggttgcctgttctctctgatggtagtttcttttgctatgcagaagctctttagtttaattagatcccatttgtcaatcttagcttttgttgccattgcttttggtgttttagtcatggagtccttgcccatgcctatgtcctgaatggtattgcctaggttttcttctagggtttttatggttttaggtctaacgtttaagtctttaatccatcttgaattaatttttgtataaggtgtaaggaagggatccagtttcagctttctacatatggctagccagttttcccagcaccatttattaaatagggaatcctttccccattgcttgtttttctcagatttgtcaaagctcagatagttgtagataagtggcattatttctgagggctctgttctgttccattgatctatatctctgttttggtaccagtaccatgctgttttagttactgtaaccttgtagtatagtttgaagtcaggtagcgtgatgcctccagctttgttctttcggcttaggattgacttggcgatgtgggctcttttttggttccatatgaactttaaagtagttttttccaattctgtgaagaaagtcagtggtagcttgatggggatggcattgaatctataaattaccttggtcagtatggccattttcacgatattgattcttcctacccatgagcatggaatgttcttccatttgtttgtattctcttttatttcattgagcagtggtttgtagttctccttgaagaggtccttcacatcccttgtaagttggattcctaagtattttattctctttgaagcagttgtgaatgggcgttcactcatgatttggctctctgtttgtctgttattggtgtataagaatgcttgtgatttttgtacattgattttgtatcctgagactttcctgaagttgcttatcagcttaaggagattttgggctgagacaatggggttttctagatatacaatcatgtcgtctgcaaacagggacaatttgacttcctcttttcctaattgaataccctttatttccttctcctgcctaattgccctggccagaacttccaacactatgttgaataggagtggtgagagagggcatccctgtcttgtgccagttttcaaagggaatgcttccagtttttgcccattcagtatgatattggctgtgggtttgtcatagatagctcttattattttgagatacgtcccatcaatacctaatttattgagagtttttagcatgaagggttgttgaattttgtcaaaggccttttctgcatctattgagataatcatgtggtttttgtctttggttctgtttatatgctggattacatttattggtttgtgtatattgaaccagccttgcatcccagggatgaagcccacttgatcatggtggataagctttttgatgtgctgctggattcggtttgccagtattttattgaggatttttgcatcaatgttcatcaaggatattggtctaaaattctcttttttggttttgtctctgcccggctttggtatcaggatgatgctggcctcataaaatgagttagggaggattccctctttttctattgattggaatagtttcagaaggaatggtaccagttcctccttgtacctctggtagaattcggctgtgaatccatctggtcctggactctttttggttggtaagctattgattattgccacaatttcagatcctgttattggtctattcagagattcaacttcttcctggttagtcttgggagagtgtatgtgtcgaggaatttatccatttcttctagattttctagtttatttgcgtagaggtgtttgtagtatcctctgatggtagtttgtatttctgtgggatcggtggtgatatcccatttatcatcttttattgcgtctatttgattcttttctctttttttctttattagtcttgctagcggtctatcaattttgttgatcctttcaaaaaaccagctcctggattcattaattttttgaagggttttttttgtctctatttccttcagttctgctctgattttagttatttcttgccttctgctagcttttgaatgtgtttgctcttgcttctctagttcttttaattgtgatgttagggtgtcaattttggatctttcctgctttctcttgtgggcatttagtgctataaatttccctctacacactgctttgaatgtgtcccagagattctggtatgttgtgcttttgttctcgttggtttcaaagaacatcttgatttctgccttcatttcattatgtacccagtagtcattcaggagcaggttgttcagtttccatttagttgagcggttttgagtgagtttcttaatcttgagttctagtttgattgcactgtggtctgagagacagtttgttataatttctgttcttttacatttgctgaggagagctttacttccaagtatgtggtcaattttggaataggtgtggtgtggtgctgaaaaaaatgtatattctgttgatttggggtggagagttctgtagatgtctattaggtccgcttggtgcagagctgagttcaattcctgggtatccttgttaactttctgtctcgttgatctgtctaatgttgacagtggggtgttaaagtctctcccattattattgtgtgggagtctaagtctctttctaggtctctaaggacttgctttatgcatctgggtgctcctgtattgggtgcatatatatttaggatagttagctcttcttgttgaattgatccctttaccattatgtaatggccttctttgtctcttttgatcttcgttggtttaaagtctgttttatcagagactaggattgcaacccctgcctttttttgttttccatttgcttggtagatcttcctccatccttttattttgagcctatgtgtgtctctgcacgtgagatgggtttcctgaatacagcacactgatgggtcttgactctatccaatttgccagtctgtgtcttttaattggagcatttagcctatttacatttaaggttaatattgttatgtgtgaatttgatcctgtcattatgatgatagctggttattttgcttgttagttgatgcagtttcttcctagtctcgatggtctttacattttggcatgattttgcagcggctggtactggttgttcctttccacgtttagtgcttccttcaggagctcttttagggcaggcctggtggtgacaaaaatctctcagcatttgcttgtctgtaaagtattgtatttctccttcacttatgaagcttagtttggctggatatgaaattctgggttgaaaattcttttctttaagaatgttgaatattggcccccactgtcttctggcttgtagagtttctggcgagagatccgctgttagtctgatgggcttccctttgtgggtaacccgacctttctctctggctgcccttaacattttttccttcatttcaacttcggtgaatctgacaattatgtgtcttggagttgctcttctcgaggagtatctttgtggcattctctgtatttcctgaatctgaatgttggcctgccttgctagattggggaagttctcctggataatatcctgcagagtgttttccaacttggttccattctccctgtcactttcaggtacaccaatcagacgtagatttggtcttttcaaatagtcccatatttcttggaggctttgttcgtttctttttattcttttttctctaaacttcccttcttgcttcatttcattcatttgatcttccatcattgataccctttcttccagttgatcgcatcggctcctgaggcttctgcattcttcatgtagttctcgagccttggctttcagctccatcagctcctttaagcacttctctgtgttggttattctagttatacattcatctaaatttttttcaaagttttcaacttctttgcctttggtttgaatttcttcctgtagctcagagtagtttgatcatctgaagccttcttctctcaactcgtcaaagtcattctccgtccagctttgttctgttgctggtgaggaactgtgttcctttggaggaggagaggtgctctgctttttagagtttccagtttttctgctctgttttttccccatctttgtggttttatctacttttggtctttgatgatggtgatgtacagatgggtttttggtgtggatgtcctttctgtttgttagttttccttctaacagacaggaccctcagctgcaggtctgttggagtttgctagaggtccactccagaccttgtttgcctgggtatcagcagcagtgtctgcagaactgcggattttcgtgatccgcaaatgctgctgtctgatcggtcctctggaagttttgtctcagaggagtacccggccgtgtgaggtgtcagtctgcccctactggggggggtgcctcccagttaggctgctcgggggtcaggggtcagggacccacttgaggaggcagtctgcccgttctcagatctccagctgcatgctgggagaaccactgctctcttcaaagctgtcagacagggacatttaagtctgcagaggttactgctgtctttttgtttgtctgtgccctgcccccagaggtggagcctacagaggcaggcaggtctccttgagctgtggtgggctccacccagttcgagcttcccggctgctttgtttacctaagtgagcctggacaatggagggcacgtctaccccagcctcactgccgccttgcagtttgatctcagactgctgtgctagcaatcagcgagactccgtgggcataggaccctccgagccaggtgcggaatataatctcctggtgccccgtttcctaagcccgtcagaaaagcgcagtatttgggtaggagtgacccgattttccaggtgccatctgtcacccctttccttgaccaggaaagggaacatcgtgaccccttgcgcttcccgagtgaggcaatgcctcgccctgcttcgtctcgcgcatggtgcgctgcacccactgtcctgcgcccactgtctggcactccctagtgagatgaacccggtacctcagatggaaatgcagaaatcacctgtcttctgcatcgctcacgctgggagctgtagaccagagctgttcctatttggcctggaatttcttttttaaatgattgaagacattccagtttgctgatagtttttatcatgaatgagtgttaaattttctcaaaagtttttctgggccaggtgtggtggctcatgcctgtaatctcagcactttgggaggccagggcaggcgaatcacttgagccaggagttcaagactggcctgggcaacatacaaaaatacaaaaaaaattatctggatgtggtgggcgcctgtaatcctagttgctcaggaggctgagacaggagaatcgcttgaacccaggaggtggaggttgcagtgagccaaggtggtgccactgcactccagcctgggcaacaaagagtaaaactccatctcaaaacaaaacaaaaaacaaaaaaagtgtttcttcatctattggtttttcacattatatggcttttttctttttttaatattactataatgaattatgttgattgatttttgaaaaatttagttgtcctgggataaactccacttggtcatgatataatacttttgtatatattgttttatatattaaatatgatgaatttgctaatatgttgttactgatttttcttgtctgtggttcataatggatctaatgtatagtttttctgtttgatgtcagggtaatgctatctcataaatgaattgggttgtattctctcctcttattattttctgaaagaatttatatagaattggtattatttcttaaacgtttgttagaattcactgtgaagccatctatctgacttggagatttctttgtggaaagttgtttaaccagtagttcaattttggtaatagaatgaagactgttcaggttatcagtttttcttttaattcaatgagcttttgtagtttgtgactgtctaggaatttgttcagttcatctaagttgtaaaatgtattggcataaagttgttgccctttttatccttttgatgtttgtataatctgtaacaataccccttttttattcttgttattgatgatttgtatgtctcactttttcccctggttctttggctacaggtatatcaatgtagttgatcttttcaaagtaccacagcagcttttagtttcatggatttcttctagtatttttgttacctcatttctcctcttttattttgtatttcctttccctctcatgactttgggtataattagctcttcttttccaattcttacatagatggaagtgtacattgagttaagacatttctttttttctaatagaagctttaaatgctataaatttctctgtaagcactatttaaagggctcccaagttttgacatgttgcattttcttattcagttgaaaatattttctaattttctcatgtttgttttttgctcattggttatttagaaatgtgtttaatttccaaatatttggggattttccaaatagcttcctgtaactggttctagtttaattctgtttcagtcagagcagagtctatatgatgtcttcctaaatttatggagacttcttttatagcacagagtacagtttaatttggtcagtgttctctgtgcccttgtaaagaatgcatattctgatgttattgggtgtaccctgtaaatatcagtgagattaaattggttgattgtgttgaaagttttctgtattcttattgttcttcagtctgttaaagcaatgactgaaggaagaaagttgaaatcttctattataactaagctttgtttttagatgcatttatatttaggattgttgtatcctctcatgaattcaccctgtcctattattatgaaatgcttcaattaatccttgataatattctaaataatattgtcctgaaatctattttggttaatatttttatagccattctaactttcttatgattgtatggtatctttgttctttgtgctgctataacagaatgcctgaaactggataatttatgaagaacaaaaataaattttctcacaattctggaggctgggaggtccaagataaagattcaggcaggtttgggtttctggtggggtctgttctctgcttccaagatggcaccttgaggctctgtcctcacatggcaaaagtacaagccagccacatgctacgtgaagccccttttacaagggccttaatcccattcacaaagggagaaatcttaatgactggcctaatcacgtattaaaggccctacttcgtaatactatcacattggcaacacctgaacgttgtttggtttttgtttcgagatagggcctcgctttgtagcccaggctggatttcagtggcacaatcatggctcacttcagcctcaacatcctgggctcatgggatcctctcacgtcagcctcctgagtagctgatactacaggcatgtgacaccatgcccagctaatttttctgttttttatagagacacaatttcaccatgttgcctaggctggtcttgagcttttgggttcaaccaatctgcctgccttggcctcccaaagtgctaggattacaggtgtgagccactgtgcctggcctacacctgaattttagaggggacacattcaaactatagtatatgatatacctgatttccatcctttttactgttggtttttttttttgttttttttttgagacaggatcttgttctgtcacccagactggagggcagtggtgcaatcaacctcccaggatccagcaatcctcccaccgtagccacctgagtagctaggactgcaggcatgtgccacctcatctggctaatttttaaattttttatagaggtggggtctcactatgttgcctaggctggtcttgaactcctgggtccaagtgatcttcctgcctggcctcccaaagtgctgggattataggtgtgagccactgcaccttgcccatcctttatacttttatttacctatgttttaacgtttatagttaatctggtacagctagtagatggtttggtttttcttttttcctccaatctgatactcttatcttttaattggagtttttagtccattcaatgtaattatcaatatagttgaatttaaatatgccatcttcctattttttccaattatgttttctttttttttagattgagaaattttttatgatttcatttgtttctgtattatttattcacttattagaagtacttctttattttcttgtttgttttgttttttagtggttgctctaggccagaggttggcaaaccattgcatttgagctaagtcaggcatgatgcctggttttgtagagttttattggaactcagccaacggtgaaagcattttgcttagtttatattgctttctttctcttcaagttcactgatcttttctttcttcaatgtgtaatctgttgttactaccacccgttgtatttttcatatcatgtatttttcttctctagaacttttctttgatcctttttatatcttccatttctctcatgtttatctttttttctacattcttgagcttatggagtatgtttataatcctgttttgttgttgttgttgttgaaacggagttttactcttgtcgctcaggctagagtgcaatggtgtgatctcagctcactgcaacctctgccttccgggtttaagtgattctcctgcctcagcctcctgagtagctgggattacaggcacctgccaccatgcccggctaatttttgtatgtttagtggagattggggtttcaccattt[135 bp omitted]ttgtttgagactctgttgcccaggctggagtgcagtggtacaatcagagctcactgcagcctctaactcctgggctcaagcgatccccccacctcagtctccagtgtagctgggaccacaggtgtgtgccaccacacctagctaatttttaaattttttgtagagacagggttttgctatgttgcccaggctggtctcctgggctcaagtgatcttcctgtctcagcttcccagagttctggaattactggcatgagccactgtgcccagcccatcttgtttgttaaatccatcacctctgtcatttctgggtctgtttcttttgatcattttttttccctcatgaatattagtcctattttgcatgcttggaaattttttacttgaattttaaattgctgaatgctggattttgttatgttacgttaaagaattaagttacttcagtccattttgatccttttgaggcttgcttttaagtttttgttagtgtaggtcaagagcagcattttggtctacggctaatttagtccgattcctggagctacattaacacattattttcacccaaaattcatagtttacattagggttcactattgatattgataatgtgggttttgacaaatatataatggcacatattcaccattatattatcttacaaaatggtttcactgccctaaaaatcctctttgctctgcctatttatccctccctccctgctaccccctggaaaccactgatctttttactctctccaaaatgttgccttttgcagaatgccatttggttagaatctggaagactatataccatgtagccttttcagagtggcttcattcacttcgtaatatgcatttgaattcctcctaacccgttcttgcttatctgttcctacattctgttgtattttgtgtcagtcacatacgttttaatgattcatttcattcctctgttagctttttagttatgcgtttgcattttttgtgtgattgccctaggattacagtatggatcttcaacttaccaggattttcttaaggttaatattaaattagttatggtaaaaatatatcaatcttgccacattatagtttcatttattaatacctgtcttttacttttttgtttgccatgtatatgatatttatgtttgcaataagtggtattagaagggtctgtagtccacaggccaaaatccagcctgtttcctattttgtacagattgtgagctaagaattgtctttgcatttgaaacgtttgaaaacatttacaagaaaaaatattcctgacacactaaaacttcatgaaatttaaatgttagtgtccataactaagttttattgaaacacatctttgctcatttatttacatattatctatggttgctttcatgctaaaatagcagaagacattccctgactgctgcttgaaacagtcatatctcataaagaagaaaggaaatgaatatttatactcttacaatttttcttattttcttcataccttcctaaagaccttagtgttatttttaccttaagcctgaagaatttcctttaggccccaccaccccttccccttcccccactccagagatagagatctcactttgttgcccaggctgatctcaaactcctggcttcaagcagtcttcctgcctcagccccacaaagtgcccggattacagaagtaagccaccacgcccagcctattagcatttttgatggtgcagtcctgctggtgatgttgcccaggctgatctcaaactcctagcttcaagcagtcttcctgcctcagccctccaaagtgcccagattacaaaagtaagccaccacacccagcctattagtatttttgatggtgcattcctgctggtgatgaattctctaggttttatctgaaaatatctttatgttgccttcattttgaatatatagttttgctgcgtgtagaattcttggctgtgtagcagtttaattaggatttggctaagtgtggttttctttggtgtttatccttttagggttaattaaactccttgaatatgtaaattaaaagttcttgccaagtttggagttaggccattatttccataaaatttatttatgccctttctttttctctccccattctgggactctaattatatccatgttggatttttgaatatgacctatggatctttgtgagtctgttcatttttcatgattcttttttctttctgttcagattacttactttctcttgattgatttacacagatactgattctctatttctgtgctcctatcgagcttctctagttaattttttatttcagttatttctttgaatacatttagaacagctactttgaagccttttttttttttttttttttttggcaaaatctgacatcagggcccactaggagttagtttctgtgattgtctttttgtgactacaggttttattccccccactcctttttgttttgttttgtttgcatgtttagtaatttttgctagaaaactggacatcataaatagtattgtaatctgaattctgttatatctgttatgttcttctgagaattattattatttttagtaggcaattagcttgcttgtaatcaaacatcaaactttgtcttcctgctcagtgtaaagcagctgatatatcctcttagttcttcaagcttctagctgctgccttttaccctaacctcctgaaagcagataggttctctcttgtgttcatctgcttttctctcaatcaaggaattggtgagtgtttagatttgggggctcacgtcctgcatttctctttttcaagttttaccctctacacttcctgctgctttgtcagttcaagctctgacaccttaatcccgtaagccttaaattttattcttcttgggctatgagcaggttgtggaataccatcagtcaagaagcagaagccttagaatcttattaggtgcacttttatttttcaagattcttttctgttgtatttctgcctgctttttgctaagccctcggtgatctctccaacacatgcatattttatcaaccaggagtttggcagagtttatgctcagattttcattttcatccgttctgtagttccctcacttccagaattaacctaaatttccagctctcactttttgtgtgtgtgtgtgtgtgtgacacagtctctctctgtcacccagactggagtgcagtggcacaatctcggctcactacaacctccatctcccgggttcaagcgattgtactgcctcagcctcccaagtagcaggattacaggcacccaccaccacacccagctaatttttgtatttttagtagagacagggtcttgccatgttagctgggctggttttgaactcctgacctcagatgagccaccacgcccagcctcaagctctcgtttctgtcctcccgtcacctttgaggaagtaagtggtggttttatgccatgagagctgtggggtttcaggtaccatgatgcaaaaacagccacaaaattagcagttcttgtacattgcagttgctatccttcaaggataagctcttttccagtttccgcctgctttggttgctttccagtgctattagttgtttattgtatggcatgtgcacattttataattattatctgagggaaagtgtccctgactgttttactctgttaatgctgcatgctgaaaaatctcaccatgcacatacaatattcctccttagtgaagcctgagaaattgttctacctttgtgatacatgctgtatcttgtacatacttctttgttgtacctgtgacaccttcttgcaggtttgtgtttacttacattttcttgcaagtatgtgttacatgcctctggtaacttctgagcagaaacagtgtttgtcttggcacttccataaataaatacagtttttggcattaagtggcttcacagtaaatattcttagaatgtgttatttaaaaactaactgatggatatttttaccttgatttttgttttccctacaatataaatcataaaacagggaaaattgtagtctttctatattaggattcgtatgactgccacaaggaagcagggtcaaaagtagttcccaatatccagtccacctgttctttttcttttccttttttttgacagagtcctgctctgtcgcccaggctggagtgcagtggcatgatctgggctcactgcatcctccgcctcctggtttcaagctattctcctgcctcagcctcccatgtaactgggattacaggcgcacaccactatgcccagctaattttttgtatttttagtagacatggggtttcac[131 bp omitted]cattctagggatcagtgtctttcaatgatgtgactgtggacttcactcaggaggagtggcagcacctggatcatgctcagaagactctatatatggatgtgatgttggaaaactattgccacctcatctctgtgggtaagaaaaatcctctttgaaactttagtagcatgcacttcctctcaaagtgcctaattgtgtataatcttgaatttcaggaataagaggtgatgaattccttttcgttagcagaatgaatgattgtgtcttcacttacccagtgcaaggtgctacctatattgttacacaaatgggtgtcttaatttgcagtactgaacatgcccctttcctcatttttcagtggtattatagcccaatcaacttaagtctttttttcacttttcagggtgtcacatgaccaaacctgatgtgatcctcaagttggaacgaggagaagagccatggacatcatttgcaggtcatacctgcttgggtgagtttctggctcttaggcagacacagtctagcagaatgtaaatttaaaagggtcaagtgggggtgatacctttgaaatgtttcaggagtatctttttttaaaggctcttgacctctgaaaaccttcatgcctataaaactcaaaaccagacctttaggctaggtatggtggctcatgcctataatctgacactttgggaggccaaggtgagaggatcacttgaggccacgagttcagagccagcctggacagcatagcaagaccccatcactacaaaaagataaaaataaaaaattagccaaggttgggtgtggtggctcacacctttcatcccagcactttgggaggccaagatgggcagatcccttgagcccaggagtttgcaaccagcctgagaatcatggcaaaaccccatctttacaaaaaaaatacaaaagttagctgggcatggtggtgtgcacctttagtcccagctactcaggaagctaaggtgggaggatcacttgagcccaggaagtcaagtctgtggtcagctgtgattgcaccactccaacctgggagacagagcaagagcctgtctcaaaaaaaaaaaagccaggaatgatggcatacacctgtggttccagctactcagaaggttgaggtaggagaatcacttgagcccaaggattcaaggttacagtgagctaggattataccactacacaccagcctgggctacagagccaagaccctgtctcaaaaacaaaaacagaaccagacttttaaatatcactctctccggctgggcacggtggctcacacctgtaatcctagcacttcgggaggctgaggcgggcagatcacctgaggtcaggagtttgaaaccaacctggccaacataatgaaaccctgtctctactaaaaatacaaaaattagctgggtgtggtggcacatgcctgtaatcccagcgactcaggaggctgaggccggagaatcgcttaaacccggtaggcggaggttccggtgagccaagatcgtgccattgcactccagcctgggcaacagagcaagactccatttcaaaaaaaataataatacactatatatatcactctccccaaatacattctttcctagtttgcttcatattatcaaaaacaactgccactctgaatgtaccataagccatctttcttttagatcttttttattagctcgtgtatctttttccagccttctcagtccttatcttgccattgtgataagttttgtcaggaaaggtttatttatttatttacttattggttgttttttgtttttgtttttgagatggagtcttactctgtagcccaggctggaatgcagtgacgtcatcttggctcactgcaacctccgcctcccaggttcaaatgattctcctgcctcagcctcctaagtagctgggattacaggtgcgcatcaacaggcctggctaacttttttgtatttttagtagagatggggtttcaccatgttggccaggctggtctcaaactcctgaccttgtgatctgcccacctcggcctcacaaagtgctgggattacaggcttgagccactgcacctggcaccattgtaatagatttctttcaggctttcttcatcctgtctttaaaaagagaaaattattggttagtggtcctctccttacttacttaacatttcctttccttcataccacctcggctttgttttctgtgctaagctccccttctcactacaaatttagctattaattttagaactcacttaacacaacccaggttgataaagtcaaagttgccattttcttccataaaacctttgtggttcattttacatggcttttcatcattcctgcaatcaatcctttgtttaagtgaaataacactaattcttatcctaattccttgaatgcttatttacaacttggcctgttttctttaccactgtggccatatcacctgaaaaatgcttggcatataatagtcataacagattttatttttttaaataaatgtttattgtttcacttaacactcggtcttatttctctcatatgccctcacatgatctacctttcaattataatgattccatgcattctcagactgatgctgtttattttatgtagatggcactgacgtcaacatacaaagcacatttctcctaccttcactccagttcatcaggcgtactacagtctatcatctcacctattttctgacaatgtgtcagaaatgaaaatcactgactttctcagctcttaaatttttccccactatttatttatttatttattatttttgagatggagtcctgctgtgccacccaggctggagtgcagtggttcagtctcggctcactgcaaactccacctcctgggttcaagtgattctcctgcctcagcctctggggtagctgggattacaggtgcccaccaccatgcccggctaatttttgtatttttagtagagatggggtttcaccatgttggccaggctggtctcgaactcctgacctcaggtgatccacctgcctcagcctcccaaagtgctcagattacaggcatgagccaccgtgcctggcctcccattatttaactcaaaataataataataataataataataataataattattattattattattattattattattattatttgagatggagtttcgttcttgttgcccaggctggagtgcaatggctcgatctcgactcaccgcaacctccggctcccaggttcaagcaattcttctgcctcagcctcctggttagctgggattacaggcatgagccaccacacccggctaattttgtatttttagtagagatggggcttctccatgttggtcaggctggtcttgaactcctgacctcaggcaatctgcccgtgtcagcctcccaaagtgctgggattacaggcctgagccaccgtgcccaatcccttcaaatttattttgtttctactacaaagtcaacttgatttttctgtctctcttatcatttcttatggatctcttcacaatttgtaatatgtttatcagcttgtgaaatatattgacatcctcccatattctgatttctcactgatgtcatacaaaatgacaactatcttatttcatgtatttattactggaattaccatttgtctttgtggtaaattttgtctggattcattcaatgtatattgttactttcctcacaaaatataccatcagtttttccctttttttttatcatttattctatgaaatggaaatttctcttctttcaggaactgtcacaataagccctcatctggtcttttcaactttctcttggagaaaattcttgataatttccacttgatctagtctcctaattgttgttcatgaatgtagggtttgtcatcacatagatacttttcattgtgttgtgttctccctttatactatatcttttaagtctcaagatttctctgtgaaatcttccttgattactgcacatcatatctaccttcctttttttctgaattcctgtcctaactactgactataacacaaacatgcacaactcttgaatagtcatataatttcattcctaattgtttttgcttaaggatttttaaggatgcttaaggattctttccctcaaaaataagatcccttttgaatcttcatttctttgaaggaatcaagcattcttaaggattcttttcctcaaagataagatcccttttgaaccttcattactgtggtattatttaacatgttaggtattcagtagttactgtgttaattgcttatggagctatgtaagggagatatcttttcatccattcagaaagcatatactagcaagttccttttagatgtacctactcatgctgtgtccctacagattgtgcttgaagtggttgcattctgccagacaccacctaactatgagtatgcagtgatcatgtaaaatttttttttttaagatggagtcttgttctgtcgtccaggctggagtgcagtggcacgatctcagctcactgtaaactctgccttccgggttcaagtaatgctcctgactcagcctctggagtagctgggagtacaggtgcatgccaccatgcccggccagctttttttgtatttttagtagggacagtttcaccatgttggccaggctggtctggaactcctgacctcaggtgatctgcccgcttcggcttgccaaagtgctgggattacaggcatgagcaaccgtgcccagcccaaaagagtttaaagatcaccaataaagtatttatttctatgaagaaggatcactatcgagtctgcatttttcatgaaatatttatgtcaaagtgtaaggttgttaaaagatttgttaacagagttttcctaggcaataattatattgcaaattttaaagaagtagagcttaaaatggtaggggaaacatatgaagggtttatgagatcatggaatggtatgatttctttgaagattctctaaagataaatagaaataaacctggaaggcaagctaattaattaaaagaatgtgtgcacaagtgtgttattaggaataagtaaggtatatatagggcagtaagtatcaggcctgactgaggcaaaaactacctgttataaacaggtgagatctgtcaggtatgtggacaaccctgaaaacttgtgagaatataaaaaatgaatctagacaatatagttttgtttacaggagaaattccttgtatatgttagaattgaagttcttggactcaatgaagaaatagatttttgagcatagctttaacattgcttcatcagatatagatgattgcaaggtaagtaaagttagaaatagctatacttttataagagaaatgaaggttaaagttactctgatttaggaccagattgttcaatctaccatttgaaattggtattctgatctaccatatgaaaaactggaataaaggaatgttactgcattggggaaggatgtaagccagtcttaaacctggaaaagtgagtcagtaactgaaaagaggactaggcatgagagctttgttattgaacaattctgaaagaagtgatttagcagcagtctgaatatagcaattgaatatattctgatcttttttaaagttgctatcggaagtattttcctaattttccattcataagagaaaataatacataattatgtagaggattagagcatagactgtagaaaatgaattgataatttaaaagctaaattaatcaatgttgactacatagaaagaggaggtgggttgaacagctggaagtgttttaccacagtcatctagggatgtgtgtataaaagtattggtgatcagccgggcacagtggctcatacctgtaatcccagcattttgggaggccaaggtgggcagatcatgaggtcaggagttcgagaccaacctggccagcatggtgaaaccccgtctctactaaaaatacaaaaaattagctaggcgtggtggcacatgcctgtaatcccagctattcaggaggctgaggcaggagaatcgcttgaacccaggaggcagaggttgcagtgagccgagatcacgccactgcactccagcctgggtgacaaagcgagactttgtctcaaaaaaaaataataataattattataggtgatctgtgtcctccagaagtaatctttcctctagtattttcgctaaacaaagatttctgctaatttttcttgtccatcctacttacattttaatgcttttgataggttcacttcattttttctgaacacttatctaaccatcaacccccttctaccattctttgacttcttggttggtttcactttctctaagaagttttagtgcaaaatgcaaaaggtattaatgtttattgtttacatcttcatccttttccactctgaagcagtttttgtttaggttcccctccccgcacccctgccaggccagtggtcatttgttctgagtctctttttgcgccatgtgctagaccctagtaaaatttctttgcataggaaatgtgtgaagattcacaaattgttatcaattatattcttttctagaagaaaactggaaagctgaagactttttagtgaaattcaaggaacaccaagagaagtattctagatcagttgtaagcatcaaccacaaaaaactggtgaaggagaagagtaaaatatatgaaaagacatttactctaggcaaaaaccctgtgaattcaaaaaatctacctcctgaatatgatactcatggaaggattttgaaaaatgtttcagaattaatcatcagtaatctaaatcctgcaagaaagagacttagtgagtataatggatatgggaaatcactcctgagtactaaacaagagactactcatcctgaagtcaaatcccataatcaaagtgccagagctttcagtcataatgaagttcttatgcagtatcagaaaacggaaactccagcacagtcatttggatataatgactgtgagaaatcattccttcaaaggggaggcctgattacacatagtagaccttacaaaggagaaaacccatctgtatataataaaaaaagaagagcaaccaatattgaaaaaaaacatacatgcaatgaatgtgggaaatctttctgcaggaaatcagtattgattctgcatcagggaattcactcagaagaaaaaccctatcaatgtcatcaatgtggaaatgcatttagaaggaaatcatatctcattgatcatcagagaactcacacaggagagaaaccctttgtttgcaatgaatgtggtaagtccttccgcctcaagacagccctcactgatcatcagagaacacacacaggggagaaatcgtatgaatgtctgcaatgtaggaatgccttcagattgaagtcacacctcattcgtcatcagagaactcacacgggagagaaaccatatgagtgtaatgactgtgggaagtccttccgccagaagacaacactctctctacatcagagaatccatacaggtgagaaaccctacatttgtaaagaatgtgggaagtcctttcaccagaaggcaaatcttactgtacatcagagaactcatacaggggaaaagccctatatttgtaatgaatgtgggaaatccttctcccagaagacaacccttgctcttcatgagaaaactcataatgaggagaaaccctatatttgtagtgaatgtggaaagtccttccgccagaagacaacccttgtagcacatcagagaacacatacaggggagaaatcttatgaatgtcctcactgtgggaaggcctttagaatgaagtcatacctcattgatcatcaccgaactcacacaggagagaaaccatatgaatgtaatgaatgtggtaaatcattcagtcaaaagacaaatctcaatctacatcagagaattcatacaggggagaaaccctatgtttgtaatgaatgtgggaagtcctttcgccagaaagcaaccctcactgtacatcagaaaatacataccggccagaaatcctatgaatgtcctcagtgtgggaaagcctttagcaggaagtcatatctcattcatcatcaaagaactcatacgggagagaaaccatataaatgtagtgaatgtggaaagtgcttccgccagaagacaaatcttattgtacatcagagaactcacacaggtgagaaaccctatgtttgtaatgagtgtggtaagtctttcagttataagagaaacctcattgtccatcaaagaactcacaagggagaaaacattgaaatgcaataaatgatgtggtttcttatatgaattctttacaagctgttgtaaacatttagttttaaaaagaaaagcatgctgaaacatgttaatgtaattttaaatcacaagtctaataattattaaagtaccatacggaataactgtctactgtttactagcatataaaataagtatgatcattattattgaactctatcagctatgaagctaaattttaaagtcaactgctcttcctactgactcaaatagtttattttttaaaaatacttatataatacatgcagagacaagatacacaatgattataagtattaatctccataagagaaaatatttatgaactatatttctcattgcactctgtaataaaaagcagttagttgttacttacctaagagttaccacttccgtagcctataacatcaaaacgtagtttttgcatgttttcaattttataaatatatattttatcagacatcatgaattattttgtgtcttgcttatttcactcaattttttaagatctgtacattattgcatgtggcagtagtgtattttcattttgcatactattccattttaagaatatattgctgtttatcctattgatggatatttgtattttttatacttttgtgtaataataaaaatactgctgtaaatattcttgtttatatcatgtgtgtgtttgcgtgtatgtatttctgttgaatttatacctgggactggacttattcattccaagagtatatatgaggtttttttggtcattcagactggagaatttctactaaaaagaaaccttgcggctttataattgtgagaaggctattaataaatcatggacatgtgaatgcagtatatgtagaaggcctttagctgtctctcaatgcttaaatgcaaaacaagcaaattcgtattggagggaaatcttgtagttgtcatgattttaggggtactttagccatagcttattacaccttatttaatatcaaggaattagaattcatacaagagaaagggacattgagaagggaaataggtgaggaaaatttgagagtaccagagtctttttttttttcttttttttttttttttttgagacagagtctcgctctgttgcccaggctggaatgcagtggagcgatctcggctcactgcaacctctgcctcctgggttcaagtgcttctcctgcctcagccttctgagtagctgggattacaggcatgtgccatcacgcccagctaatttttgtatttttagtagagacggggtttcaccacgttggtcagactggtctcgaactcctgacttcatgatccgcctgcctcggcctcccaaagtgctgggattacagggtgacccaccacgcctggctacaacataagccttttctaccataatctataagaaatgtaagtctctgaaaatcccaaataagtgactagagagattttgatgtttgagaattggaaatctgcgaagacagtgacttccacggtatccttttggcgaggagagtaagctcagtggcaacttgaacagcattattgcaggtccttcttgggaaggattacttataaccagtatttactatgtatatgaagtcattgtaataaaattcagtagaaattgaaatttattaattaatttattttttgaaatggagtctctatcgtccaggctggagtgcaatgacatggtctcaactcactgtaacctctgcctcctgggttcaaacgattctcctacctcagcctcccaagtagctggtactacaggcacgtgccaccacacgcagctaatttttgtatttttagtagagacagggtttc[142 bp omitted]ctgcataaacagaaagatggttcagggttcaaatatttgacattaaatatattaaacagaccctctggcctgttagagagggacagccattgccaatcagtagtaaatggaaccattcttgtcaatccttatttttctgataatttcatagcaaaaaatgaacagggcaatgagacaaaagcataaaaatttagacttgatagtagcacacagaaaacacacgtgtgtgtatgtgtgtatatatgtaaaatgccttgtctataatgactagacatgtcattaaatttagccttaataatttatatatgcataaagattttttaaagtatacatttttaaagaatataaagaattattaataggtttaataaacctattaaagtaactaaaacaggtaattataggacttataatcagaactgtgagaacccaaggattttgtcattgtgaatttataggggagttatatactagtatatgctaacagtggtgactaacagaagaattgtactcatgaccaaagatggaagcctaccttgtttttctaggtggagaggatggcctaactggatgtttatcctagcgtcaacccaccaaagatttggggaacatgtgagtcacattctctgggacattctactcccctttgattttgcatttccagacatttcagtggctaccacaaaaaataaaaagtatctgtggcatcactgcatgtgctgccctgtctcctgatttactgattatcatgaaatagccatgtactgtttcagtagaacattgtatccaatgtccactttattttcaaacatactacatatattcatgttttatagctcttgaatatgaagaactagaaagtatgagatattaacgggcagttttataaatggccaaactttgaaacttttgaggctgggcgtggtgtctcacacctgtaatcccagcactttgggaggccaaggtgggcagatcacctaaggccaggagtttgagaccagcctggccaagagtgaaaccccctctctactaaaaatacaaaaattagccaggtgtggtggcgcattcctgtaatcccagctactcgggggcctaaggcaggagaatcacttgaacccagtaggtggaggttgcagtgagccaagatgatgccattgcacgcctgcctggccaagagagtgagactgtgtctcaaaaagaaaatataatcatgaatataatcattattatttgtataataattattgggcatctttccataatcatgctcataactttcagttttaacatgttctttgtatgaaaaactgatgagtttcttatgaaactgtctatggctgtatcatatggcaattctgtatttctttttttttttttttttttttgagacagtttcactcttattgcccaggctggagtgcaatggtgcgatctcggctcaccacaacctctgcctcctgggttcaagcgattctcccagctcagtctcccgagtagctgggattacaggcatgttcccccatgcctggctaattttgtatttttagtagagatagggtttctccatg[139 bp omitted]ggcttcactattttacattaccaatggcaatgcaaaaaggttcagatttctcaggccaggtgtggtggctcatgcctgtaatcccagcactttcagaggctgaggcagtctgatcaattgaggtcagaagttcaagaccagtctggccaacatggcgaaaccccatctctactaaaaatacaataattagcaggcatggtggcgtgtgcctgtaatcccagctactctggaggctgaagcaggagaattgtttgaaccaggcaggtggacattgtagtgagccgagatcacgccactgcactccagcctgcgcgaaaaagcgagacttcatctcaaaaaaaaaaaaaaaaattagctgagcttggtggtggggttctataatcccagctacttgggaggctgaggcaggggaatagcttaaacctgggaggcagaggttgcagtgagctgtgattgtgccactgcactccagcctgagtgacagagtaagactccgtctcaaaaaattaaaaaaaaaaaaaagttcacattcctccatattctttccatcacttattttccttcaaaaaattttttgaattaaaaccttttttgtgggtgtcaagtatctcattgagattttgatttgtgtttctgtaatgattaatgtaggtttctttcattcttgaacatagtttgctgaaaataggatttgggattgagagttgttcctttcagcacttgaaaaatgtcacttctttctggtcttcatggtttctcataagaaatctgctattttaatttttttcctctaaaaatatggtatttctgtcttactactttcaagatttttattttttgtctttaattttatttaattttattttatttttgagatggagtttcactcttgttgcccaggctggagtacagtggtgtgatctcggctcactgcaacctccacctcccagtttcaagcgactctcctgtctcagtctctcaagtagctgggattacaggtgcatgccaccacacccggctaattttggtatttttagtagaagcggggtttcaccctattggccaggctggtctcaaactcctgacctcaggtgatccacctgcctcggcctcccaaagtgctgggatcacaggtgtaagccactgcacccggccttgtctttaattttcgcaagttgggtacaatgtgttacggtgttacgttttggggatgggaagaaagttatcttgtttaaattcactcagcttcttgaatctgtcttttgccaaatttggtgagttcttagcaattactactttaagtcctttgtagtaggggagaggggatgtcttgctctctcacccagtctggagtgcagtggcatgatcacagctcactgcagcctcgacctcctggatttaagcgatcctcccacctcagcttcctgagtagctgggactacaggaatgcaccaagaggcctggctaacttctatattttttacagagatggtatcaccgtgttgtccaggcttccttaagtactttttcagccctgtcttctttttcctctccttccaggatttcaagggcatgaatgttaatcttgtgttacattctcacagttcttcattcttttcatgttatttttttcagtgtactatctctctcttgttcagattgggtagttcctattgttctgtactgcagttcactgattgctctgtctcctctgtttccactctttgtccctccatttgagtttattttagttatattttcaattctatactatttggttattttgtatgtcttctaatttcttgtctggactaattctttgttgagatattgtatctcatttgtttcaagtgtgtgattgttcaggcatttttatgatgtctgcttcatgtatttatcatataattctgacatcattgtcattttcatgctcgtcttttttcatttgagattttcctggttacaattattgaatttccattgaaatgtgcaattttatctattatgagattgtagatcttatttaaacctgttttagctggctttttgataccaccctggcatggggagggcaactgtgccattttgctgtgccacatagggggtgagaatccagatttcccactcaccttctactgacacctgggtggaagtgctcctcctcacggttaggtgtgactgaggagttctggctccctattagtcacctttttatacctctcttataccccagtaagagagacagcggtgccttgttaatgatttccatttgccttccatatacaccacagaggcagggctggccctgttaggcgggatagtagtgaagatcctgactttactatgcctactccgacactggcccagcaggtagtttaacaagtatctttttactgctgcatatgggaatggaaatccagattccccaaatgactccaggggccctacgtaattccatctgcagttatagtcctggctcccttcacagtcttcctgaaaccatcctggcagggaggtcagagtatcttgttacagtctactgagagtagaagtctaggttccctactcagcctttgcaaggtgcatgagtggagtggcatcaggtgttttgagtttctttctttctttctttctttttctttctttctttctttctttctttcctttttttttttcctgtgctttttcgttagagtagatcaattttatttatttatttatttatttatttatttattttttgagatggagtctcacttcttcacccaggctggagtacaatggtgcgatctcggctgactgcaacctctgcctcccgggttcaagcaattctcctgcctcagcctcccaagtagctgggattacaggtacgtgccaccacacccggctaattttgtatttttagtagagaaggggtttccta[131 bp omitted]cggagtctcggtctatcacccaggctggaatgcagtggcgtgatctcaactcactgcaagctccacctcctgggttcatgccattctcctgcctcagcctcccgagtagctgggactacaggcacccattaccatgcccggctaaatttttgtatttttagtagagatggggtttcactgtgttagccaggatggtctcgatctcctgacctcatgatccgcctgcctcggcctcccaaagtactgggattacaggtgtgaaccaccgcgcccggccttgcaattcttatctagacgttttgtcttgctcgggtgcccttttcttggtctgtttctacacagagcatccttttattaggacttttttttctttttgagatggagtcttgcactatcaccaggctggagtgcagtggcacaatctcggctcaccacaacctccacctcccaggttcaagcaattcttctgcctcagcctcccaagtatgggattacaggcatgcaccaccacacccggctaattttgtatttttagtagagacggggtttctctatgttggtcaggctggtcttgaactcccgacttcgtgacctgcccgcctcggcctcccaaagtactgggtttacaggcatgagccaccgctcctggcctgttttgtttgtttgtttgtttgttttttgtttttttctttgggccaataatagataaaccaatgccatgtgcctcctaatgacatgcactgagaaggatacatcattgctgtaatggtatttctgtttaaaatgtataacctgtatctaaaatgaggaaacatcagataaatccaaattgaggttattgagaacaatgattctaattaaatagtatgaaatagagaaaacgtaagtaaatactctatattcctgaattttaattggtgggagtatcactttgaccagtccagcagcaatacacatcactagcacatacattatggtatttatggaccatttcctgctaaaagaaaccaggatttcttgggagaagtggctgattccaagtatgggcagaaaatttttaatgagcctgcagtattttctcataccagataataacaaagctaatttaaaaaatcagtagattaatgacaaagcactgccaacttggaaaggtttccaatgaccaaggataggacaaatcaagcttaaatataaaaataatttatatttgaaacacaccaaatacatttatagttgaataaatataaatctacatttatagttgaataaatataaatctacatttatagttgaataaatataaatctacatttatagttgaataaatataaatctacatttatagttgaataaatataaatctacatttatagttgaataaatataaatctacatttatagttgaataaatataaatctacatttatagttgaataaatataaatctacatttatagttgaataaatataaatctacatttatagttgaataaatataaatctacatttatagttgaataaatataaatctacatttatagttgaataaatataaatctatatttatagttgaataaatataaatttacatttatagttgaataaatataaatttacatttatatttataaaaatttatatttgaaacaccaaatacatttaaattcccaaatttatagcaataccaaagaatcagtgatcacagaacaataaggagcaaagttattatcttaaaaactggtatctaaaaggaaaaaatatatcttggttatcctatgtgaacaataccagtggggggtatccaagtagcatcagtgggcagcttctctttgtgaagtattccagctaatgtatttcaaaattttttcttctggaaataatgtatttgtgtcatacttggtctccaaacctgaaaaaagcaagaaaacagatgttttcctgtaccaggaaaaaaacccaaaaccttggagataagtgatgaattgaaaataaggtacactagaaatatatttcaataatgtttttacacaacttgaaggaggcaaagagagtttagagaataatgaaagaggatgtggtgagggtggtgataaagcaaataggttgtcatcagctctaagatttaagtgttcgaagactactggttccaaatgatggagcagaagaaaactggcttcactgcccaccaacagaaaaccaaaaacaagtgtgcatcaccaagattatcaccaacaatattctagaactcaaatatgaagatgagtcagttctggagctacaaagaagtgaaaaatctctgagcagtggtaggagaatcagacttccacatccatgacacctcttcccccattctgcctggcaccaaacatagaaaatttcccctcaactcatggtttctgtagtggaaaaagtgagattgaggtgcaccaccagcttccccaccatcttgggtgtcctggccttgccttaacccatgggaaactctggtttgtaacttggccagaggagatgcaaaatcagtgtggttaggccaggcgtggtggctcacgcctgtactcccagcactttgggaggccaaggtgggcggatcaggagatcgagaccatcctggctaacacggtgaaaccccgtctctactaaaaatacaaaaaattagccaggcgtggtggcgggcacctgtagtcctagctactcgggaggctgaggcaggaaaatggcgtgaacccgggaggcggagctttcagtgagccgagatcatgccactgcactccagcctgggagacaaagcaagactctgtctcaaaaaaaaaaaaaaaaaaaaaaaaaaaagatatataagagctttatcctctaagcccaacatgtagatcttgtttaaactcagtgtggctgttcagcagcagcatgctgtaggaggttcattccacagatctcttgggcacaaacccctagccagccctcccacacggccagaataccctctttgggacctaccccattaaggaagtgaattgctccaaccgttactaaagctaaggcgaaccaggttttaaggcaccacctagagctgaaaaggaggcagcaacctcatgataaaaaaacctctaagccaatatgtccagtaaaaattgtagg[140 bp omitted]gggtgtggtggcgggcgcctgtagtcccagctacttggaggctgaggcaggagaatggcgtgaatcgggaggcggagcttgcagtgagccgagatcgcgccactgctctccagcgtgggtgacagagcgagactccgtatcaaaaaaaaaaaaaaaattgtaacaagccagtcagagaacattggaataaataaataatacttcaatgcaaagacatcaatgtacatccataagcaacatgcctaaagagggaaccatgatctcaccaaatgaacaaagcaagaaaccagtaactaactcatcctaacaagatggcaatatgtgagctgtctgataaaaattgaaaatagcagttctaaagaaacttagtgatttccgagataagactgaaaagcaattcagaaatgtatcaaagaaatttaacaaagaaattgaaaaaaataaaaaaacggaaatcaaatcttgcaactaaaaaatgaaatttctaaacagaattcattataggctctcaatggcagaatgggtccaatagaagaaagaatccatgagctccaaaataagttatttgaaaacacaaagtcagaggggaaaaaaaagaacacagaatgaaaaggaacaaagatcatctacaagatgtagaacattacctcaatagaccaaatttaagaatcattgatgttgaggaaagagttgaataagagacaggggtacaaagattatttttaaaaatattaataactttccagtcttctttggaaagaaaactttccaaaacttgagaaagatatacatttccaggtacaggaaggtcagagaacaacaaacagagttgacccaaatatgattaccccaagtcatataataaactctcaaaggtcaaggaaaaagagaggatcctgaaagcagtaagagaaaataaacaaatggcatttaaaggagctctaattcatctggcaacagacttatcaatggaaaccatacaggacaggagggagtcaaatgacattttagaagtgccataagaataaacattgccatccaagaataccctatccagcaaagttagctttcaaatatgaaagagaaagtttttcccagacaaacaaatgctaagagaattcaccaccaccatacccctgttacaagaaacgctaaagggaatttttgttttttcttttttgtccttttcttttttattttttgagacagggtctcactttgtcacccaggctggagtgtagtggtgcgatcttggctcactgcagcctcaacttcccaggttcaagcaatcctcccacctcagcctctcaagcagctgggactacaggtgtgtgccaccatgtccagctaattttggtattttttttatagagatggggttttgccatgttgcacaggttggtctcaaactcctgagctcaagtatctgccctccttggcctcccaaagtgctaggtttacaggcatgagccactgcacacagcctaggagtttttcaatctgaaagaaagaacattaatgtgcaaaaagttttttcaaagaaggtacaaaacccaccagtaaaattaagtaaacagacaaacccaggatactctactactataaatgtgtgtaattcacttataactctagcatgaagcccaaaagacatatctatcaaaaacaataatggccacagcaacctcttaagagagaggtaatataaacatatgtaaatttggagaactaaaagtaaaaatatggggggaaagggttaaagtgtggaaaattttttccatttttctttatttctattcttttatttgtgatctaagataggttggcacctctttaaagtaatttactgtatctatactatgttttttgtaagcctcatagtaaccacaaagcaaaaacctatgaaagagtcactaaaaataaaaagcaatgaattaaaacaccttaccagagaaaaatcgcttaattacaaagggacacaggaaagaagaaaggaggagaggagtaaaacaggcaacaaaatggcacttttaagtacttatttatcaaaaataatactaaatgtaaatgaactcaattccccagttaaaggcatacagtggctgaatgaataaagataaaacacaactatatgctgctgccaagaaacccacttcacctataaaaatatgcacagattgaaagtgaagacatggaaaaagataccccatgcaactggaaactagaaaagagcagaagtagctatagttttatgaagtaaaatagactataaatcaaagacaaaaaagagacaaagatggtcactatataatgattaaggggtcaattcagaaacagaatataacaattacaaatatatttgcacacaacactggagctcccatgtatataaaggaaacaatatagctaaagggagagatggactacaatataataatattaggagatttaacacaccattttcagtaatggacatatcatccagagagaaaatcaacaaatattagaggtaaactacacactagacctaataggcctgatatttacagagcatttcacccaactgctggagaatacacattcttttcattagtacatggcatattctccagaatagaccatatcttcgaccacaaaacaagtctaaacaaatgtttaaaagtagaaatcatatccagtatcttttctgaccacaatggaataaaactagaaataaataacaagaggaacttcaaacacttcataaacacatagaaattaaacaacatattaatgaatgaccaatggatcagtgaagaaattaagaaggaaatttaaggccagacacagtggctcatgcctgtaatctcactactttgggatgctaggcaggaggaaggcttgagtccaggagtttgagaccagcctgtgcaacatagaccttgtccctactaaaaattaaaaaattgactgagcatgtggcatatgcttatagtcccagctacttgggagcctgaggcaggaggacgcttaagctgaggaggttgaggttgcagtgagctatgatcataccactgcactgggcaacagagcaagaacatatcccaacaaaaaaaggaaattttaaaatatcttgaaacatatgaaaatggaaatataccaaaatatatgggacacagcaaaagcagtattaagaaggaagtttatagaaatacatgtctatatcagaaaactagaaacacttcaaataaacaatctaatgatacacctcaaggaactagaaaagcaagaacaaaccaaacccaaaacagtagaaggaaagaaataataaagatttgagcagaaataaatgaaattgaggctaaaacaacaacaacaacaaaaacaggctaggcacggtggttcacacctagaatctcagcactttgagtggctgcagcaggtggatcacttgatgctaggagttcaagaccagcctgggcaacaaagtgagacccccatctctacaaaataaaataaaaaattttactcaggcacagtggcaagtgcctatactcccagctacttaggaggctaaaggcaggaggacagcttgaccccatgagttcagagggtgcaacaagctttgattgtgtgactgcactctagactgggcaacagagtgagaccctatctctaaaaaaacagaaaaggccaggagcagtagctcacgcctgtaatcccaacactttgggaggctgaggcgggcagataacctgaggtcgggagttcaagaccagcctgaccaacatggagaaaccctgtctctactaaaaatatgaaaattagctgggtgttgtggcacatgcctgtaatcccagctacttgggaggctgaggcaggagaattgctcgaatgccagaggcagaggttggggtgagctgatatcgcgccattgtactccagcctggggaacaagagcaaaactccatctaaaaaaagaaagaaaaaagaaaatgcagtagatcagtgaaataaaaagttgattctttgaaaagataaagtcaacaaacctttaggtagactaagaagaaaaaaaagatccaagtaaataaaatcagaaatgaagaaggttgttgggcatggtggcttatatctgtaatcccagcactttgggaggccaaggcaagaggagcacctgagcctaggcaatgcagtaagaccccatctctacaaaattagtcccatctctaaaaaattagccaggcatggtggtgcacgcctatagttccagctacttgggaggctgagtcgagaggatccttccagcccaggagttcaagactgcagtgagctatgattgtgccaccgcactccagcctgggccacagagggagagatccagtttgtttttcttaataaaaggacacataataacagaccacaaagaatcatcagagacaatcatgaacaactatatggcaacaagttggaaaacccagaagaaatggataaactcttggagacataccacagattgaagccataataaaatgtctaccattgaagaaaagcccaggaccttatggcttcactgctgaatcaaacatttaaagaagaactagtaccaattctactgaaactcttcacaaaaattgaagaggagggccagcataactctgataccaaaatcagacatgagtacaacaaagaaagaaaacgacatcttcactgatgaagaaagatgcaaaaatccttaagaaaataata[133 bp omitted]tcaacatggtgaaaccttgtctctactaaaaaacaaaaaaattagctgggcacggtggcatgtacctgtaatcctagctgctggggaggctgaggcaggagaatcacttgaacctggaaggcagaggttgcagtgagctgagatcgtgccactgcactccagcctggggaacagagcaagactctgtctcaaaaaaaaaaaaaaaaaaaaaaaaatcattcaccttgatcaaatgaaattcatcccagggatgcaaggatggctcaacatacacaaatcaataaatgtggtacatcacattcacagaatcaaaaagaaaaaccacatgattatttgaatagatgctgaaaaagcatttgataaaattcaacatccgtttatgataaaaaccctcatcaaagtgggtatagaaggaacatacctctagataataaaggccatatatgacagacttacagctaacattgtactgagtggggaaaaattaaaggtatagtagggagaccccatgaaactattgctatggaataaaagatgaaatgctcctgattattgtaaatacaaagttgcatgcaggattgtgtaaaaacaatgccaagttggactgccagaatgagccaacagcacgtgatgtgctttcctctgcagagagcctataaacggacgtgcagtcagggaggtttcacatcaccaagattcctatcccagaaaagcagatgttcatagctctgggaatggaatgcgacccttgtggagagcctataaatggacgcatgggggcgcctgttcatatggataagatagggctataaacgccctcatcttgccacagctcttctaggtctctttagggttaaggcatactcccttctgagaatttctggtctaaccggttgtctggcttcacgtcctgtttctatggattgtttgtaaccagcttttgctgcaactgttactgctgattaatatcttgctaatcataggttatggagactgcgtttctgttttaaggctctgttagaaattactgatgcacactattgtaaattcttatctctgtatactgtacttctgcatacagatgttatgttaaagaattacttcatccccatgtgaccatctcacctcataatcaaatgaccctaaatccctcactaacctacccccgccctcattaaacttagtaataaatgctggtatatccagtgcattgttggcaccgcgggaccagaaggtggtgacccccctggacccagctttcactatcttgtgtgtgtctattatttctcaacctgccgatccgcctgggaacaaagagagagccccgttgcattgcaggctactggccagatcccgcaataaggtatgttctctaagatctgaaacaagatagaaatgctcacctttaccacctttattcaacatagtgctggaaatcctggcaagagcaattaagcaagaaaaaaaagggcgtccaaattgaaaaagaagtcaaattctgcagaagacatgatcttatatacttaataacctaaagactccaccaaaaaaccgttagaactgaaaaatgaattcagtaatgttgcaggatacaaaatcaacatatcaaaatcataacatttaatatacactaacagcaaataacctgaaaaaagaaatcaaggaaagcaatcacacttaagaagctacaaagaatagaaaatagctacaaagtatagaaaatacctaggaatcaagttaaccaaagaagtgaaagatgtatatgaggaaaactatgaaaaactgatgaaagaagtagaagatgacacacaaaaaaggggaagatattccatgctcatggattagaataattaaaatgacaatactactcaaagcaatttatagattcaatatgatctctatcaaaatgccaatgacattcttcatagaaataggaaaaaaatcctaaaatgtatgtagaaccacaaaagaccctgagtagccaaaggaattctgagcaaaaagaacaaagctggagacatcatattacctgacttaaattttctacaaacctatagtaaccaaatcagcatagtactggcataaaaacagacacagaccaatgtcatagactagagaacccaaatatcaatccatacatttacaaccaaataatctttgacaaaggtgccaagaatatacaatggggaaaggaacgtttttttcataaatggtgctgggaaatttggataattacatgcagaagaatgaaactagacctctatctttaccatacacaaaaatcaagtcaaaatgtaagacctgctactagaagaaaatattggggaaacactcacagacattggtctacacaaagacttttttatataagaccataaaagcacaggcaacaaaagcaagactccaccaaaaaactgttagaactgaaaaatgaattcagtcagacaactgagattacatcaaaataaagtttctgtgcagcaaaggaaacaatcaataacatgaagagaccacccacaagacgggagaaaatatttgcaaacaacccatctgacaggggattagtattctcttatataattatatatatgagaatatataagaacatataaggagctcagacaactcaatagcaaaaaaaaaaaaaacccaattaaaaaaaatgggcaaaagatctgaacagacatttctcaaaagaagacatacaaatggccaatgggtatatgaaaaaaatctcaatatcactaatcatcagagaaatgcaaatcaaaactacaaagagatatcatctcaccccaattaggacagctattatcagaaggacaaaaaaataacaaatgctggcaaggacgcaaagaaaagggaacccttatatgctgttggtaggaatataaactagtatagctactatggaaaacagtttggaggtccctcaaaaaactaaaaatagaactatcatatgatccagcaatcccactgctgggcatatacccaaaagaaaggaaatcagtatatcaaaaagacaactgcactccatgtttgctgcagcactgtccacaatagccaagatttggaagcaacctcagtgtccatcagcagatgaatggataaagaaaatgtagtttgtgtacatgagggaataatattcagccataaaaaaagaatgagatcctgtcatttgcaacaacatggatggaatttgagatcattatgttaagtgaagtaagccaggcacagaatggcaaacatcacaggttctcacttatttgtggaatctgaaaatcagaacaattgaactcacagacagacagagtagaaggatggttaatggaggctgagaaaagtcatgggggaagtgatgagggttaatgggtaaaaaaagaatgaataagacctactatttgataacacaacggggtgactatactcaataataaagtaattttacatttaaaaatacctaaaagagtataattggattatttgtaacacaaaagataaatgcctgagaggatggataccccattctccatgatgtgattattatgcactgcattcctgtatcaaaacatctcatataccctataaatatatacacttactatgtacccacaaaagttacaaattaaaaaaaattaaaaaagattttaaggccgggcacggtggctcatgcctgtaatcccagcactttgggaggccaaggcaggtgtatcacctgaggtcaggagtttgagaccagctttaccaacatggcgaaacctcgtctctactaaaaatacaaaaaattagctgggcatggtggtgtgtgcctgtaatcccagccacttgggaggctgaggcaagagaatcgcttgaacctgggtagcggaggttgcagtgagctgagatgttgccattgcactccagcctgggcaacagagcaacactctgtctcaaaaaaaagaaaagaaaaaagatttaaaaaaaccacagccaaatagcaagaaggagtatactgaatattcccaacaacaaaaaagatgtttgaagtggtggttatactattaataattaccctgatctgctgactatatgttatgtgtaccaaaacatcactatgttccccacaaatgcgtacaatttttctatgtcaatttcaaaaataaaatatttgtgaaaaaaaagaacatgataaggccaggtgtggtggctcactcacgcctgtaatcccagcactttaggagactgaggcaggtggatcacttgagctcaggagttcaagaccagcctgggcaacatgatgaaaccctgtgtctacaaaaaattagcaggatacagtggcacatgcctgtagtcccagctacttgggaggctaaagcaggagaattgcttgagcccgggaggcagaggttgcagtgagccaagatcatgccactgcacttcagagcctgggtgacagagtaacactccccccactgccaccccccaaaaaagaacataatacataaagaatacatgtatattatagacattagagcaaatcctaaaaaatataaaaacaaagaggtataactaataaaccatagtagagataaaatggaatcataaaaaacaattgtaaagaagaaaggaaaaggccaggcatggtggctcacgcctgtaatcccggcactttgagaggctgaggcaggcagatcatgaggtcaggatatcaagaccatcctggccaacatggtgaaaccccatccctactaaaaatacaaaaaattagctggccatggttgcgtgcacctgtaatcccatcttgggaggctgaggcaggagaattgcttgaaaccgggagttggaggttgaagtgaggcgagatcaccccactgcactccagcctggtgacaaagcaagattccacctcaaaaaaaaaaaaaaaaaaaaaaaaaagaaggaacaaacaacagttaggacaaaacaaatggcaagctagtggaactaaatctaaccatactgatacttacttgagatgttaataatctaaaccagggatcagaaaactttatcaataaagggccagagtgtaaatacaagttttctggacccacagagtctctgtcaaatcattcaaccccttagttgtagcagaaaagcaatttaaaacatgtaaacaaatgagcatttgttgtattccaacaaagctttatatataaaacaggtgacaggctggatttatcctgggaaccatagtttgccattccctgacctaaacactccaactaaagacagagattgtcagattgtataaaaatgtaagaacacagccaggcctcatggcacgtgcctgtagtgctagctactggggaggctgaggcacaaggattgcttgagcccaggaggttgaggcagcagtgagttgtgactgcaccactgctgtccagcctcggtgacagagcaaaaccgtgtctcaaaacaacaacaataacagcaaaacaccaaactaaaactatacattgtctacaagacacccactttaaatttaaacacctagatagtttaaaagtaaaaaaaatgatgggaagagctataccatgcaaccaccaatcatggctatattaatatcagacaaagtagacttcagaataaggactgttacaaggaacaaagagggaattttataatgataaatgggaaaaacaatcctgaatgtgtaagtacatgataacagagctccaaaatgcacagattaaaaacagataaaactgaaaaagatatagagaaatacacaattatagttagatatttcaacactcccctatcactgatagaacaagtagacacaagactaattttaaaaggagaaatattctgtgattccacttttgtgaggtacttagaacattcacatttatacatacaggaaatagaacagtagtcaccagaggttaggagattggggaaatgggaagtgttgttagaaaggcttacagtttcacttttacaaaatgaaaagggttctggagatggacgttggttgtacattatgaatgtacttagtactgactgtacacttaaaaatagttaagatggttaattttatatgtattttacaataaaaattttgaacaaaatattaattggttttttgagaagatcaataaaattgataaacctctaagcagactgatcgaaagagagagagaacacacaaattgccaatgtcagaagtgaaagtgtggacatcaaaactacaggctgggtgcagtggctcatgcctgtaatcccagcactttggagggccgaggcgggtggatcacctgagatcaggagtttgagaccagcctggccaacatggtgaaaccccgtctctaaagtacaaaattagctgggcatggtggcacttacttgtaatcccagctacttgggaggctgaggcaggagaatcgcttgaaaccaagaggcagaggttgcagtaagctgagattgtgccattgcactccagcctggaaaacgagagtgaaactccgcctcaaaaacaaaaacaaaacctacagttataaaaagcagatctggctgggcgtggcagctcacgcttgtaatcccagcactttcagaggccgaagcaggcagatcaccggaggttgggagttccagaccagcctgaccaacatggagaaaacccatctctgttaaaaatacaaaattagccaggtgtggtggcgcatgcctgtaatcccagctacttgggaggctgaggcaggagaatcacttgaacctgggaggcggaggttgcggtaagccaagttcgcgccattgcactctaccctgggcaacaagaccaaaattccatctcaaaaaaaaaaaaaaaagaagaagcagatctgcagttgaagcaagctgtgaataagcagggagggaaggaccgactgcaaagggacatgaggggactttttgggatgatggaaacatcctctatgattgtgatggtagctaaacaaataccgatatcaacattaatcaagttgttcatttcaaagtatgaattgtaatctatgtaaattatacctcaaccaacttaacaaaaatataacaagtcttgaggtcttgtctttgaatagtggaagatacaatctctggctaaatataggcccaagtggttttatttatagcttgacatagttcctttattaaaatttgtttttgttttttgagacagtcttgctctgtcacccaggctggagtgcagtggcgagatcttggttcactgcaacctccacctcctgggttcaagcgattctcctgcctcagcatcccaagtagctgggattacaggcgcccaccaccatgtctggctaatttttgtatttttagtagaggtggggtttcaccatggtggccaggctgttcttgaactcctgatctcaaatggtccacccacctcggcttcccaaagtgctgggattacaggtgtgagccaccatgcccagctaaaaattgttttaattaacaaaaccataaacgtacagcaatcatccttaatggcgaacattaaaaatatttccttggccaggaacaatggctcacacctgtaatcccagcacttcaggaggccaaggacggcagatggcttgagcccagaagttcgacagtggcctcgacaacacggcaaaaccccatctctgcaaatacaaaaatgagccgggcatggcagtgcacacctgtagtcccaggtacttgggaggctgaggtggaaggactgattgagcctgggaggttggggctgcagtgagcagtgatcatgccactgccctcaagcctggtgacagagtgagaccctgtctcaaaaaaaaaaaacaccaaaaaaaaaaaaaacctcacttaaagaaagggtcaagtgaggaaactagttagtgctgtagacattcatattacacatatgatccaagctacaagtataaattaagaaataaggcatatagaaaggaataggcaaatacttttatttacaaataataccaacatctctttagacaattcaatctcatgaagaaaccatttcatctactaaagtagttcatcaatgttacaatccttagacaaaaaccaacagtttagtacatagtaatagtaatcaattacacaacagaaaaaatatcccaatcatattataaacaaaagccattaagtatctagaaataagtaaaacaagaaatgtgtacacttttatgctaaaaatataaagacttactaaagcacataaaagaatacctactgaaataaagacacaccaggtacaagagaaaaactcaatgtcgtaaagatgtcaataatgattcttttctttctaatactatggcagaggagaaatattgaaactcctctattaaaaggatttaccggccgggcacgtggatcctgcctgtaatcccagcactttgggaggccgaggcagtcagatcacctgaggtctggagttcaagcccagcctcaacatggagaaaccctgtctctattaaaaatacaaaattagccgggcgtggtggtgcatgcctgtaatcccagctactcaggaggctgaggcaggagaattgtttaaacctgggaggcagaggttgcggtaagccgagatcgtgccattgcactccagcctgggcaacaatagcaaaactcccgtctcaaaaaaaaaaaaaaggatttaccccaaatagatcatctttggtcaataagaatatacaggtgatctttctgtcttcattgtgcttttctctgctctttaaaaaattctacttttttcataaaaagagttaatttttaaaagtgaaaagtaaaaacgttaagagtattggctgaacacagtggctcacacctgtaatcccagcacctaggaggctgaggtgctaggaccaattgagcccaagagttcaagaccagcctggacaacatggtgaaaccctgtctctacaaaagatacaaaaattagctaggtgtggtggtgtgcgcctgtagtccttgctactcgggaggctgaggtgggggatcgattgagcccgggaagttgaggctgcagtgagccaagattgtggcattgcactccagcctgggcaacacagcaaaaacctgtcacacatgaaaaagacaactgtgaactgtaaaaagcactcctccatcttcaccctctctgtatatatttatgtttaaatatctccaaggaagcagttacaaaaacatggagaataataaatgacagagtaagaatttgagaacaaacatttgatttgtttccataaattgagaca[137 bp omitted]tggtgaaattccgtctctactacaaatacaaaaaattagccaggcgtggtggcgggcacctgtagtcacagctactagggaggctgaggcaggagaatggcgtgaacctgggaggtggagcttgcagtgagtcgagatcacgccactgcactccagcctgggcgacagaacgagactgtctcaaaaaaaatcaattgagacaaagcctcaattgattaaccttaaaataaccttcttaaaagatatgtgtgtgtgtgtgtgtgtatataaatcatccataagcatattagtaaaagtacaaatcaacagatatgttttagagaagtgttaaattttttaaacgcaagtgtaatttaaatagaatgaaatacaacaatccgaagtgcatagacgatgaggtaagatttttttcatcaactttattgaagtgtaatttacatataataaaatgcaaccatatgtctacattcatgcaaataccaccttgtaagaaatgcctttcctgactaccttatctaaattagtcctgcccagagttcagagaccagcctgaccaacatggagaaaccccgtctctactaaataatacaaaaattagtcgggcatggtggagcatgcctgtaatcccagttactcaggaggctgagtcaagagaatcgcttgaacctgggaggcggaggttgcagtgagccaagatcgtgccattgcactccagcctgggcaacaagagcaaaactccatctcaaaaaaaaaaaaaagaaaaaagaaaaagaaagtcccaggtgcagtggctcatgattgtaatcccagcactttgagaggacaaggtgggccattctttatattcataaggtgggaagattgcttgaagacaggaattcaagaccagcctgggtaacaaagcaagactccaactctactgaaataaaaaataaaaacttagctgggtgtcatggtgctgctgggagtatagcagtgaggacgaccagaggtcactcttgtcaccatcttggatttggccgacttctttactgcaagatgttttctcagcaaggtctttatgacctgtatcttatgctgacctcatatctcatcttgtgacttagaatgacttatctgtctaggaatgcagtccagtaggtttcagtgttactttacacagctcctattcaagaagaagttgctctggtttacacgcctctgacgtaaccatgcagtgaacaagtctattggctccatttattcaccagcatgtgctcactttgtatctgtgtcatatttggatgatcccaacaatatttcaactttctcattgttgttatatctgttatggtggcctatgattatcttaggcaccactacttgttttagggcatcacaaactgtgtccatataagacagcaaacttaattgataaacatggtgtgtgttctgactacaaacttaattgataaacactgtgtgtgttctgactgctccactgactggctcactgcaacatccgcctcccaggttcaagcgattctccagccttgcctcctgaatagctgggattacaggcatatgccaccatgtctggctgattttgtatttttagtagagatggggtttcaacatgttggccaggctggtcttgaactcttaacctcaggtgatccacccacctcagcctccgaaagtgctggcattacaggcgtgagccaccacgcccggcttggaatttctaatataaattgcccactggatccaaaggagaaggtgcgcacagactttagttttgcttgctttctttccagcaaggactttcttagccacctttgcagttatgggctaaagtagacagggaaatagacagggaaggcgaagcttaaaacaaagtcagtagtcaaacatgaaaaatatagtcacacttatttattataaaaaaactattactagccaggcgtggtggctcacacctgtaatcccagcactttgggaggccgaggtagggggatcacgaggtcaaaagtttgagaccaccctgaccaacacagtgaaaccccgtctctactaaaaatacaaaaattagccaagcatggtggtgcatgcctgtaatctgagctactcaggaggcagaggcaggagaatcacttgaacccaggaggcagaggttgcagtgagccaagatagcaccactgcactccagcctgggcaacagagcaagactctgtctcaaaacaaaacaaacaaacaaaaaatacacaaaaacaactattgccatcaacattttatcaattagtaattttggcacagagaatttacataactagcctaatgtcacgtaggtagtaaatggttgtcttttgtcattgaccacattctctaatatgaatttgtataacttcaataagctttgaatcatgatagaaaactcatctacattcattatcaatttctttcagtattaaatgtcctaattttggtgggtggatcaccaggtcaggagatcgagaccatcctggctaacacagtgaaaccctgtctctactaaaaatacaaaaacaaaaaaattagccaggcgtggtggcaggtacctgtagtcccagctactagggaggctgaggcaggagaatggcatgaacccaggaggcagagcttgcagtgagccgagatagcgccactgcactccagcctgggcgacagagcaagactccgtctcaaaaaaaaaaaaaaaagtcgtaattctggaaaaagtgaatatgaagtaatacacatccattgtatttgacccacatatggaatctgctgatgatccatgacaaatggcatgagaacagtttcctacattaattatgttaggtcatgaattctctgatgtcgagtaagctgtgtaagctgtttaaaggccttcccacatgtcttacattcatagggtttctcgccagtgtgaacactctgatgtcggctgagtcctgaggcatagaaaaaggctttcccacattccggacattgataagttttctcaccagtatggattcgtttatgttgactaagttgtgaaggacatctaaaggccttcccacattccttacaatcataaggtttctcaccagtgtgagttcgctgatgtcgaattagttctgagccgcaagtaaaagatttcccacattctttacattcataaggtctgtcaccggtatgaattctctgatgtagagtaaggtgtgtacgctgtctgaaggacttcccacatgtcttacattcatagggtttctcgccagtgtgaatactgtgatgtttggtgagtcctgagaaacggacaaaggcttttccacattcatgacatcgataaggtttctcaccagtatggattcgttgatgttgagtaagttttgaacgacgtctaaaggccttgccacattccttacaatcatagggtttctcaccagtgtgaattcgccgatgttggattattgctgagcgaaaagcaaaagattttccacattccttacaatgatagggtttctcaccagtgtgaattcgctgatgttcaattagtgttgagcgagaagtaaaagatttcccacattctttacaactgtagcgtttctcaccagtgtgaactggccgatgttgaattagtgctgagcgaagagtaaaagatttcccacattccttgcaatgataaggtttctcaccagtgtgaagtggctgatgttgaattagtgttgaatgagaagtaaaagatttcccacattccttacaatcatagagcttctcaccagtgtgtatttgctgatgttgaattagtgttgagtgagaagtaaaagatttcccacattccttacaatcatagggtttctcaccagtgtgaatttgctgatgttgaattagtgttgagtgagaagtaaaagatttcccacattccttaccatcatagggtttctcatcagtgtgattttgctgatgttgaattagtcctgagcagaaagtaaaagatttcccacattctttacattcataaggtttctcaccagtatgaattctccgatgttgattaaggtatgtacgctgtctaaaggccttcccacagtccggacattcatagggtttctcaccagtgtgaattctgtgatgttgggtgagtcctgagacactgacaaaggctttcccacattcctgacattgataaggtttctcaccagtatggatttgttgatgttgagtaagtcgtaaacgaagtctaaaggccttcccacattccttacaatcataaggtttctcaccagtgtgaatttgctgatgttgaagtagtgttgagccaacagtaaaagattttccacattccttacagtgatagggtttctcaccagtgtgaattcgctgatgttgaattagtgctgagcgagaagtaaaagattttccacattctttacaatcatagggtttctcaccagtgtgaactgcctgatgtccaattagccctgagcgaaaagtaaaagattttccacattccttacaatgatagggtttctcaccagtgtgaattcgctgatgttgaagtagtgctgagccagaagcaaaagattttccacattctttacaattatagggtttctcaccagtgtggattcgctggtgtcgattgcgtgttgagcgaaaagtaaaagattttccacattccttacaacaatagggtttctcaccagtgtgaatccgctgatgttgaagtagtgctgagcccgaagcaaaagatttcccacactccttacaatcatagggtttctcaccagtgtgaattcgctgatgttgaattagtgttgagccagcagtaaaagattttccacattctttacaatcatagggtttctcaccagtgtgaattgcctggtgtccaattaaccctgagcgaaaagtaaaagatttcccacattccttacaatcatagggtttctcaccagtgtgaattcgctgatgtcgaattagagctgagtgaaaagtaaaagattttccacattccttacagtcatagggtttctcaccagtgtgaattcgctgatgtcgaattagtgctgagcctgaagcaaaagattttccacattccttacaatcatacggtttctcaccagtgtgaatttgctggtgtcgaattagtgttgagccaacagtaaaagattttccacattgcttacaatgatagggtttctcaccagtgtgaatttgctgatgttgatttagtgttgagccagaagtaaaagatttcccacattctttacattcataaggtttgtcaccagtatgaattctccaatgttgaataagatgtgcagacggtctaaaggccttcacggattcctgacactcatgaggtctctcatctgtatacattttctggtgttgaataagatgtgagccagaaataaaagcttttccatattctttacatgcacagggcttttccccagtatgaattctctgatgtttaacaagataggaaaagtgatgaaaggccttcccacactccttacatttatagagtttttcaccagtatgggtttcttgctgttgtgtaagttctgagccatacttaaaagccatacattctgtggatttatacagtttctctccaggatgaatccgatgatgcagagtgagagatgtctgtaggcagaaagttggtgttgtttcataagtcattattgctttttccaaatatcgctcctgatttatatcttggtgctgaaactggcctttgcattcccagtcatctctgacactggagcccacaaggctatgacatttttccattctcacccactgagatgatgttacttcatagatttcttttggcaaacatgaatctttggtcttacatctaaactccgagtctgaaaaataaccagaaagcaaaaacatagcatttccttgttgagtagaaataaaaacatctatggtagaaaggggagacaaactgaaaataatgtccttaagaattaaagatgtgttgggcgtggtggctcatgcctgtaatcccagcgctttgggagtctgagacaggaggattgcttgagcccaggagttcaaggctgcagtgagctgtgattgtgccactacactccagcctgggccacagagcaagaccctgtcttaaaaaaaaaaaaaaaaaaaaaaagatggtgtacatacatggtatacatggtgatagtatgtacccttatatgatgtgatgagaacagtattttatctctgtgatcttccttctaaaaatactgaactccagtctaatcactggaaaaacaccagacaaatcccaaaatgagagacaatctatgaaatacctggccagtactctccaaaactattgagataatcacaaacaaggaaagcctgaaaagctgtcaaagcaaagaggagccaagggaaacataatgactcaatgcaatgtgttagcctagccaagatcctagaataggaaaaaaggacattaggtaaaagctaaggaggccaggcacagtggctcacacctataatcccagcactttgggaggctgaagcgggcggaccacaaggtcaggagttcaagaccagcctggccaacatggtgaaaccctgtctctattaaaaatacaaaaatgagccagacgtgtggcccatgcctgtaatctcagctactcgggaggctgagacaggagaatcacttgagcccgggaggctgaggttgcagtgagccaagatcgtaccattgcactccagcctaggcaacaaaaaccagactccatctcaaaaaaaaaaaaaaaaaaaaaaaaaagctaaggaaatctgagtaaagtaggggtttccattaataataatagatctcagcaccataggaaaggtaaataataataacaacattgcttcaacaatgttattatttaataggatcaacattcattcattaattatgacaaatgtacaaatataaaatgttaatgggaaactacatgtgatgtatatgggaagtctctgtactaacctcacaacttttctgtaagtctaaaactatcctaaaacctaaagtttacttttttaaagtgagaaagtaacatctcactagcaaaaaggccaagcaaatttttgtaaaagacacaaatggggtatcagtatctaaaaattaaaaaatgaatcattgaaacttaaaattcaatgaatgaatttgaattggcagtataagagtgcaatcatgatttttaaaaaatactatacatcttcatccattgaagccttagaaacaaccaatctggcagcaatgaacacgctaatgacagattactgtctctaaataccatttcttactacacagaacctaggctccttggagcatcttgggattagaacagaaagtgtgcattatgagcatggaaaaagctggcatattagaaaagcaaagaagcttattcaagactcctagggtcatgtcaaaaagactcaggaaccattgtgaagagggtcccattggccaaagatgggacaagttgagcatgaattcaagaataaaaactgtaatcattgtaatgtaattacaataaatcacatcaaatttttttaaatctgtgtgttcataaggacaattttaaaattacctagtaatttttaggggatgagatgaggaatggctgctaacttcacaaaaacagaaacaaccagatatgtgcttcttgatgaaatacacaatactaatatcacatagtctgtttataggaaagaaaggagtaaagggaggagagctaaatgttaaatgacagatgatccagtttcttcaacatataaatttcaaggagaaaaagagaaagaaatcaacaacaaaacctcactggaatggttaaataactggaaatgcaaaagcaaggttaaaagtcataaagaaaagtcaaagaattcatttgtcttcctgaaagtaatactgaaagaacagggagcaaactatattcaagatggaacagctaaaatttattcagaagtgatgaggttttctaaaaaaaatctgaggtgccatgagtgccatggatggtaaattttaaaagttctacggggccaggtgcggtggcacacgcctgtaatctcagcactttgggagtctgaggcaggtggatcacctgaggtcaggaattcaagaccagcctggtcaacatgacaaaaccccgactttactaaaaatacaaaataagccaggcatggtggtgcacgcctgaattctcagctactcagggggctgaggcagaagaattgcttaaatccaggagacagagtttgcagtgagccgaaattgtgccactgcattccagcctgggcgacagagcgagacttcatctcaggaaaaaaaaaaaaaaaaaaaaagtaaaagttctataagccaggcatggtggttcatggctctaatcccaacactttgggatgccaagactgcaagattaccagagcccaggagttcaagaccagcctgggcaacagcctgggacactgtctcaaaaaaaaaaaaaaaaaaaaaaaagccgggtgtggtggcacatgcctgtagcctcaggtactcgggaggctaaggcgggaggatcacctgagcccggaaagtcaatgctgcaatgagctgtggtcaagccactgcactccagcctgggtgaccacgggagaacctgtctcttaaaaaaaaattatgcatgatgaaatcccaataataagaacaaaatggacaggaaaaaaaaaaatagcttacacaccatgcttgctatatgccaggcactattttcactgctttacacatttactatataagctcatttaatcttcagaagaatcctgtgaatagcatatatatttgcaaatgaggaccagagaggttaagtaaattgccaaaagtcatagaggtattaaatagcagagctaggatttgaatggaggcaatctggctcaagagtccatgctttcaacttccaaatcagtggaatcgaactaagtatgggcatcagatttttttaaaacctcaaatctaaaacagtgtaaaataaaacaggcaacagaagacaggaaaagtgagacaaatagaataagctggttaaaaaaattcaaacaggccaagagaggtggattgtgcctgtattttcagctactcgggaggctgaggtatgcagattgcttgagcctagggggttgaggctgtggtgagctgtgattgctccactgcactcagcccgggcaacagagagagagagaccctgtctcaaaaaaaaaaaaaaaaaaatccaaatacatcactaattataaggaatgtaaacaaagaaaaagtaaatttcaacccttttaaaataaaaagtgactaaaaacatgaggacacaaaaaagttgaagtaaaaactaagaaaatgaaaatcaggcaagtattcatgaatagaaagctagggtcttagcactggaaaaaaatagactttaaggtgaaaacattcttgggaataaagaggattactacataataaaacgttcattcaccaaaaagatataacaattctaaatttgtaagcatccagtaaaataaactctaaatatgcaaagtaaaaattgagaaaatacaaaaagtttaggcttcatcttgattgtgggagatttcttttttttagttattttttttgagatggagtctcactctgtcacccaggctggagtacagtggcacgatctcagctcactgcaacctctgccctccgagttcaagcgattctcctgcctcagcctcccaagtagctgggattacaggcgcctgccaccacgcccggctaattttttgtatttttagtagagatggggtttcacca[133 bp omitted]tgagaggtcaagcacccagaaaatataaaaggatacagaggatctttacatcaaattaacaagcatgatatgttgaacatgtgagaattctacacgcagcaattaaaagaaagcacaggaacacgtgaatccccacccccacaaaaacactgacaattcagcagtgcgtgaagtaagtctgaacacacttccagaaactggtctcatactgaccatgtaaatattgactatagtgcaattaaggttgaattcaggaataaaaaatgggaaaagaatttaaatgcaaaacatttacaaaagcttatgggttaaaaatggcatcatgcaaattaaaaaattctttttcggtttttttgagacagagtctcgctctgtcacccgtgccggaatgcagtggtgcaatctcggctcactgcaacctccacctcccaggttcaatcagttctgtgcctcagccatttgagtagctgggattacaggcatgcaacaccacacccagctaatttttgtatttttagtacagaaagggtttcgccatgttggccaggctggtctcaaactcctggcctcaagtgatccacccacctcccaaagtgttgggattacaggcatgagccaccgcacctggcctaaaaattactttgatgctaagtgatgacaataaaaattgtatcatgggccgggctgtgtcttaggcaacaggcaaaaagcaaagacaaaacctctgtggacgaaatcaacctcaactcaacgctcaaaatattctcacaaagtttcaaggaaagagagagcacttcgcaataaaaaaaaaaaacaaaaaacaaaaaaactaacacgtacagggaaatgggaaatcacatgaagaaaaaaaacagcagaaacagaaccaaaaggcttcaaatactaatattaaagagaattattatgtttaataatgcttaaagaagttagaaagtcttgacaccactagtaaataaagtaactacatagtttttttatatatctagtttttagcctttttttttttttttttttttatggagtctcactctgttgccaggctggagtgcagtggtgtgttcttgactcactgcaacctccgcttcctggtttcatgcgattctccttcctcaacatccctagtagctgggattacaggcgcccgccatgacacccagctaatgtttgtgtttttagtagagacggggttttaccatgttggccaggatagtctcaatctcctgaccttgtgatccacctgccttggcctcccaaagtgctgggattacaggcatgagccaccgcacctggccttgagccaatgttttaagtgccatatcacctacttgttcactaagatctcaactatactttcagcacactacataaccttatttccaggaagatgtgtatttgcaaatgtttacttctatttggaacacatgtttttctacccccagaggaatgcattcttgtctggagtgtttcttttcccaagttgatgcacatccacatattcacccattcatatgtgatgtatgtgtatctatgtgtgcatttttttctttttataaaaatagaattgtcctatacatattgatgtgcaacttttccccccagataacaacagataaaggatagttatatagttactatttatagatttacttcatttccttgaatagctgcataatatcccattatgtggatataccataatgtcacattttttttccccctcaagacagagtcttgctctgttgcctaggctggagtacaatggcatgatcttggctcactgcaacctccgcctcctgggctcaaccaatttgcctgcctcagcctcccaagtagctgggactacaggtatgcgccaccacgcctggctaattttttgtatttttagtagagatggggttttcaccatgttgaccaggctggtgtcgaactcctgacctcgtgatccacccgccttggcctcccaaggtgctgggattacaggcgtgagccaccgagcctggcctgtaacagtttttgttaatgcccatttagattgttactgctgttccaggaaatgtgtttctgtatatatcagaattagctacttcttttatttctgtagcagacagtccaaaaagtgagattactcattccaaatgtaggcacattttcatttgactggctagtttgatgcttcctggcagtgtcagagatggtctgttcctagccagcaatgaatattcccatgctatatagtgttgaatttttgtttatctgaggggcaaactttggcaggggtccgttgggatatgctaacaataagataactagtaaatagaagcttttcttaacccaaatgggtagatccgtcgtgattatgttggaatttcaggagttctagaaatgaatgtgcagatggttgcacaatatgaatacaatcaaagatggttaaaatagtaatacatttatgttatgtatgttttaccataattataaataaatgaaaaaatgaatgaatgagtcactcctaaaaattagtaagaaaataaaaccaaataatgaagtagaaaagatgaaacataaaaaggaagcacaaacaggaaatatagtttctttttttttttttttttttttgagacagagtcttgctctgttgcccaggctggagtgcagtggtgtgatcttggctcactgcaacctctgcctcctgggttcaagcgattctccatcctcagcctcatgagtagctgggattacaggtgactgccaccacacccggctaattttttgtgtgtttgttttagtagagatgttgtttcactgtgttgattaggctggtcaccatgttgaccagaccactcctgacctcaagtgatctgcacacctcagcctcccaaagtgctgggatttacaggtgtgagccactgcgcccagcctctttttctttttgagacagggtcttgctctgccacccgggctggaatgcagtggtgcaatcacagctcactgcagccttgaactcctggactcaagcaatcctcctgcctcagcctcccaaagccccggagttacaggtgttagtcactgtgcctggccaaaaagtgaatttttcattttaatttcaattactttacagttaaatctaattagccccatgtagctagcggctactgtatggaacagcacagctttcatgaaccatctgttgaaactggattgcaagaacctttgtgttgtcccttcacataaaaaactaaaaccttaaatgacgactcatgccttacaggtgtagtatgtatacaaaatgaggcagaactcctagcagggtgcccattttcaaacaaaatgctttgccctactatcagagactagtaagtaagcaaataaataaattcagtaacaaaaacaactattaaaaatgggaaaaaattaaaggcaaaacatttacaaaagctcatggattaaaaattgtatcatgaaaattaaaaagttctttttttgttttcttgagacagagtctcactctgtcactcacactgcagtgcagtggtgtgatctcggctcattgctcctcctcctcctcctggattcaatcaattccgtgcctcagtcattcaagtagctgggattacaggcatgcagcaccacaccaggctaatttttttatttttagtacagaggggatttcgccacatttgccaggctggtctcaagtgatccacccatctctgattaaatgctctcatctaaaatcatatggttgtggcatatcagatcttttcactttaaacttttaaattaactaaccagctacgaatacttgtctgaactgagttggatgaggcagctccagtggatcatgcatttctgtcctagactgtcatgagctttaaaaagttaaaaccaggcc[141 bp omitted]gtgtggtggcacatgcctgtaatcccagctactcaggaggctaaggcaggagaatcacttgaaccaggaagtcggaggttgcagtcagccaagatcgtgccacagcactccagcctggcaacagagcaagactccgtctaaaaaaaaaaaaaatattggcccaggaatctcacatctgaaagattaaatatgaaaatgtccatttaaataaagatacatcagagcagtcattttaaatagaagaaacacctgggcacagttgctcatgcctgtaatcccagcagtttgggaaagtgaggcagtgggaggactgcctgagcccaggagttccagaccagcccgtggcacacagggagaacccatctctacaaaaaaaattagaaattgactgggtgtggtggtgtgtgcttgtagtctgagctactcaggaggcagaggtgggaggatcacttgagtcctggaggtcaaggctgcagtgagctgtgattgtgccaccgtactccagcatgggcaacagagagaccctgtcacaaaaacaaaaaaagaagaagcaacactgaaaagctacctatacatttaatattattgaactcatgatatccaggacttgctttagttaagggaaggtgcagaggtcaacaggcatagatcaagtaagattggaaacatggaaactcattgataactactgcagctaggaaatggatttgggggatgtccattacaccatcctttctacttttgtgtatgttcaaagacctccgtaatcaagttaataattaaaaaaaaatttttttgtaatgttctatggataaagggaaatagtcatctatatcctacaattaaaacgctttttaaaatggatagtttgcattacttaaaagcacattttgaaaaacaaaatgccttatcttttctacttcaaaagaaaaatccctcagtctatgctacttacagcccaatttttgtccatgttaacattgtcaccaacttattgaaaatggatcactccttttccttgacacttaagtcttctatatttaacttattgtcctcttttatacacaatcatttcagtgtaccttttcctcctaaaagcaggcatatcctattccttcacatttatatctacagttctttcttctaagcaccatattagaaatctcctggttgagtctactttttagaaagtgatttatacaatgatttagaccctttattaggctgggtgtggtggctcacgccggtaatcctagcactttgggaggccgaggtgggcagattgcctcagctcaggagttcaagaccagcctaggctatgtggcaaaaccctgtctctactaaaaatacaaaaaattagccaggtgtggtggcgcgtgcctgtaatcttagctactccggaggctgtggcacgagaattgcttgaattcaggatgcaggggatgcagtgagccgagatcactccactgcactccagcctgggcaacacaaagagatattgtctcaaaataaataaataaataaaccctttattagactgtaattctgatagcttatatcttccataactgtcacccaccaagaaaagaaggctttatgattttttttttaagtcaataaattttgactaaaagtgaatgaggtcagacgtggtggctcacacctgtaatcctggcactttgggagaccgaggcaggtggatcacctgaggtcaggagttcaggaccagcctggccaacatggtgaaaccctgtctctactgaaaatacaaaaagtagccagttgtggtggtacatgcctgtagtcccagctactcaagaggctgaggcaggagaattacttgaacccgggaagtggaggttgcagtgagccaatattgcaccactgcactccagcctgggtgacagagtaagactctgtttcaaaaaaataaagtgaatgaatatccattgatgcatgaaatgtctgcatcaaaggaaaactagacaagacaacacacaaaaaaagttaaggatcagtatgaaaaataaatatattttgaaaaaaaaattttttaaagcaagaacacaggtttaaatttcaaagggaaagaagtagcttgaagacagaggaaacaggatggctcccgaagaagggaactttattctttgaaatgggaagaaattatgacaagagggtagcacagactgaagaggtggaagtaaaaggggattcttggccaggcgcagtggctcacacctgtaatcccagcactttcagaggccgaggcaggtggatcacttgaggtcaggagttcgaggccagcctagcccacatggtaaaaccccgtctctactgaaaatacaaaaattagctgggcatggtggtggatgcctataatgccagttccttcaaaggctgaggcaggagagtcgcttcaacctggggacggaggttgcaatgagccgagatcatgccactgcactccagcctgggcgacagagcgagactccatctcaaaataaataaataaataaataataaaattttaaaaagtgtgtgtgggggtgtatcgtgacttctcttcatgtgtcttaggccaccacccttacatgggaccttgaagaagagactcctcaaccaatacctgtacggtgctgcctccctgacaggctggcttctaaacagcagtgtcttccccatgtgctcagtccttactcacctcggcaccatcctcccagcacgtcccttgaaaccatccagggctctttcccttgctccagtaaggaaatcacatcaggctttgggatagagagacctgtttataagaaaagaagtaagatagccaggcatggtggctcactcctataatcccagcactttgggagaccaaaacaggtggattgcttgaggtcaggagttcaagaccagcctgaccaacatggtgaaaccctgtctctactaaaaatacaaaaattggctgggcatggtggtgggtgcctgtaatcccagctactcagaaggctgaggcaggagagtcgcttgaacccgagagacggaggttggagtgaaccgagatcatgacattgcactccagcctgggcgacagagtgagactttgtctcaaaaaaaaaaaaaaaaagaaaagaagtgagacatactcctgctgttcctgaattcaaagttagtcccttagtcctcatgaaggactagaggaaggtgtagagttctgaagcatggagaagatggagtgaccccaaagagctgcccatctattaatctacaaaacacaaaacaattccctaggcaacaggtgaaaagtcacccagacaattgaaagctacacccaaaattcatgagttatttgcggatagacatccttacctagtgagaccaggctgctgtagttctccatcattacatctctgtataagtccttctgagcagcgtccaggcactcccattcctcctgagagaagtctatagacagatcctggaacatgaccaacccctgaaatgacaaacccatgcagcgctgttgaaattaaaggaaaggtttttaagatgaaggaagagatggaagggtgctgaaggatggagagaatacagtgagcagaccagctaggatgagagtggggaagagtaaaaaaattagtgtaacttcaacaaagtacctccatgttcatgaatattcctgttgcagccagcaaacctccttcatagaatgggacattccgaatattccatggttagagctgggaatgaataaaacacattgatatattatttcccaaataaatgaactagagtacaaaagcacacagcaagctgtaggcctagcaaagctgaaagaatattacagtaaacatctgatatgcaaattactatttacaacaaaagcttaataaacaggcactcctcccttaccactttctttcttgtttttttttttcctcttgtttcatttttttgtttttgttttcgttttgagacagggtctcgttctgttgcccaggctggagtgcagtggcatgatcacagctcactgcagcctcaacctcccaggctcaggtgatcctctcacctcagcctttgtgttagctgtgactataggcgtgcaccaccatgtccagctaattttttgtatttttagtagaaacgaggttttgccatttggtcaggctgctctcaaactcctgggctcaagcaatctacctgctttggcctcccaaagtgctgggattacaggcatgagccaccacacccagcctttcctcatttcttaaaggaagacaggatctttcaaaaatatctacaaaaagtttaaaaacctctattggctgggcgcggtggctcacacctataatcccaacattttgggaggccaaggcggatggatcacctgaggtcgggagtttgagaccagcctgaccaacatggagagaccattttagtctctactaaaaatacaaaattagctgggggtggtggcgcatgcctgtaatcccagctacttgggaggctgaggcaggagaattgcttgaacctgggaggcagaggttgcggtgagccaagatcgcaccactgcactccagactgggcaataagagcgaaactctgtctcaaaacaaacacaacaacaacaaaaaaaaacctctaatgcacttcactaattagtacttccataaaatagtatagatagcacttcgataattaaatgtacattggctgggtgtggtaacccacacctgtaatcacagcactttgggaggccaaggcagatgaattgcttgagctcaggagttcaagaccaattctgggcaatgtggcaaaaccccatctctacaaaaatatatatcatatacaaattagccagatgtggtgggacatgcctgtagtcccagctacttgggaggctgaggtgggaggattgcttgagcccgggaggtcgaggatgcagtgagctgtgatcctgccactgcactccagcctaggcaccagagcaagatcctgt[131 bp omitted]gaaaccccgtctccactaaaaatacaaaaattagctgggcatggtggcacacgcctatagtcccagctactcgggaggctgaggcagaagaattgcttgaacccagaaggtggaggttgcagtgagccaaggtcatgccactgcattccagcctgtgaaggatcaagactccgtctcaaaaaataaaataaagtaaaataaaatacaaaagtgagtatcatggtatgaataaactgcacacaggtcagacaaaagttacaggggcatctgccagtataagcaagtttcctgtgagacacctggtcatgggtcagacacttgagcattaggctgtgggccaggaaaaataaatgtctggtgaaaggctactgtaaagacccacaagcccctcccctagagccccattagggtgaggctagagtttattatagccattctcctgagagacctcaagacccaattagaagaaaactacaacatttgttacatagaaggcattttccaaagagtaattcaaagatagtcttcctttggatataaaacaaaatctcaagatacgccaaaactgttttgtttttactgaataatttttgtgcatgtgtgttgttgctttagctgcaagtggctaacaagctgtgattttcttttctttcctttccctttttttttttttttttttttgaagcagtctcgctctgtcgcccaggctgaagtgcctgatctcagctcactgcaacctcagcctcctttagctgggattacaggcgcctgccaccatgccgaactaatttttgtatttttagtagagacggggtttcactgtgttgctgaggctggtctcgaactcctggcctcaagtgatccacccaccttggctcccaaagtactgggattacaggcgtgagccaccatgcccgggcaactctgattttctaacttgccccctgtattagggtcatactaggaaaaaaacaagtcagaaccattggagccacgtgtacagatgtgcagtagccctgctagcaacattgctgcttgctttggctcttaggagagatgagttcagcacatgtctgcccttgctctagctgtctctgattcccaacagatgcacaatcatttcactccattagtttcactttggatatcccatcattagattaaaaccagcaggccaaaaagctaacttgaagaaatgctttcacatccacagcattctcatagggtcagtatcatttagacatgacaggaccgtggttgcaggggacagaatgaagtgtcatccttaactggccatccaatgtcatcagcatgaacaggaggactttatatgatattatctgatgttttctgaatattaccttacaaatgctgctttatttataactaaagaatagggaccctgtcttttaaagctttatatttcctcaagtaaatgtttttcgtattaaatccattaataatatctagtggctgacctggaaattccatttctaagtacttatccaaagtaaagatttttttttttttttttttgagatggagttttactcttgttgcccaggctggagtgcagtggtgcgatctcggctcactgcaacctcctcctcctggattcaagcgattctcctgcctcagcctcccgagtagctgggattacaggcatgtgccaccacgcctggctaatttggtatttttagtagagatggggtttctccatg[137 bp omitted]tgttgcccaggctagcgtgcagtgaggtgatcacagctcactgcaacctctgcctcctgggttcaagtgactcttgtgcctcagccatcaaagtagctaggaatacaggcacacaccaccacacctggctattttttttggtatttttggtagagaccgggtttcaccatgttggccaggctggtctcaaactcctggcctcaagcaatccacccaactcggcctcccaaagtgctgggattacaggcatgagccactgagccaggccagagaattttaaaagtatgaagttgtatgcagaagaatgttccttgaagacaaaaccaaaaaatctgaaacaaatgtcttgttggtagatatataatacaatactttttaatgggaaagatatgcaatattgagggagacagggaaaagagaaagcagaaaaaagaagagagaaaatgaaaattactattaggacttaaagctatttctccccagtctgttttccatacacagaacaatacagatgtgaccgcagtacacatataattttgtattctcctttacactttgattttttcttatcaaaaacactttatacatggcatttaaatggcttataactttcctaaatggctactacactgtgtacttaaccattctgtttccttctacttatgatttttgctgcaaacctttcccctccgatctgtccacatttaaattcctttaaggaagggggctgtatagaaattttaatttatgtgcattttactgaagcctacctttttctttatggtttcttttcttatttctaaacgctaatctatttgaatgtggtcaaccattccttaaaatgaacacaaacaggaaaaaattggggaactgtgtccttcaaaatataagtattttggccatgtgtggtggctcatgcctgtagtcccagcactttgggaggccaagacgggtagatcatttgaggtcaggagttcgagactagcctgaccaacatagtgaaacctggtctctacttaaaatacgaaaaaggccaggcgcagtggctcaagcctgtaatcccagcactttgggaggccaaggtgggtggatcaccagaggtcaggagttcgagaccagcatggccaacatggtgaaaccctgtctcaaattaaaatacaaaaagtagccaggcgtggtggcaggtgcctgtaatcccagctactcgggaggcagaggcaggagaatcgcttaagcatgggaggcagaggttacagtgagccaagaccgtggcactgcactgcagcctgggcaacagagcgagactcagtatcaaaatataaataaataaataaatataaaaatacaaaaaagtcgggcacagtggctcatgcctgcaatcccagcactttgggaggctgaggcgggcagatgacttgaggtcaggagttccagaccagcctggccaacatggcaaaaccctgtctctagtaaaaatacaaaaattagccgggtttggtggctcacacctgtaatcccagctactcgggaggctgaggcaggagaatcgcttgaacccaggaggcagaggttgcagtgagcagagattgtgccattgcactccagcctgggcaacacgagtgaaactctatctcaaaaaaaaaagaatacaaaaaattagcaggctgaggtggcgcatgcctgtaatctaggctactcgggaggctgaggcaggagaatcgcttgaacctgaaaggtgaagattacagtgagctgagatcacaccactgcactccagcctgggtgacaagagcgagaatctgtctcaaaaagaaaaaagaaaataaaaaagaacttttatttgggggaaaaaaaaaagaactccaaaaaaacaaaaatggagtgaaagggatttaaggaaattgaaagtcaacaggctaataatgccaataaataatgatggagcaaagaaatccatgttggccaaataacaccaacgtgtttttaaatagtttttcaaaatttagacagttttccagtacactgagacacttctgctatcaagactataatagtggctgagcacagtggcttacgcctataatcccagcactttgggatgccaaggcaggaggatggcttgagcccagaagttcaagtcaagcctgggaaatatagggagacccccgtctctgcaaaaataaaataaaataaaataataagccaggcatggtggtgtacatctgtgaactgtgaccaccccactgcactctagcctgggtgacagagcaagaccctgtctcaaaaaaaaaaaaaactataatatagagtaaatgacattcaggtaagtggaatattaggtgttcaataaacgtaggttattccctccctatctccataaaatcatcaatttttttaaaagagaaattttgattagaatctttaaaaatatcaatacttctctttccaaaaaaggagggaagatttaaatataacaatttctcaagtatttctatttattttcattgttgcttaatattactcataataatgaaaatgcaattgctctctttcaaacatagttttaattagttgtacaaaatgccaccttatagtctgatgtacttcaaatttccctatctatgaaagctaaatttggatattttcatctcaagtatattgtaatctctgtctttaaatctatctagggttctaccttttctgtcatccttagtgaatctcactatagtcctccttccctttaaaaatgcagtgataggccaggtgtggtggctcttccctgtaatcccagcactttgggaggctcaggttggaagattgctggagctcaggagttcgagaccagactgggcaacatggcaaaaccctgtctgtgcaaacaatacaaatattagcccagcatggtgccatatgcctgtaacccagctccttgggaggctgaagtgggaggatcccttcagccctggaggtcaaggctgcagtatgccatgatcctgccactgcactccagtctgggtaacagagtgagaccctgtctttaaaaaaaaaaaaaaaaggccgggtgtggtggctcacacctgtaatcccagcactttgggaggcagaggtgggtgaatcacttgagatcaggagttcatgaccagcctggccaacatggtgaaaccctgtctctactacaaatacaaaaattggttgggtgtggttgcgggcacctgtaatcccagctactcaggaggctgagacaggaagactcacttgaacccggcaggcggaggctgcagtgagctgagattgtgccactgcagtccagcctgggcaaggcagagtaagactgtctcaaaaaaaaaaaaaaaaaagaaagaaagaaagaaagaaagaaagaaaaagaaaatcagtgataggtgaggcagctcaggcctgtaatcctagcactttggaggcagaggtaggaggatcacttgaactcaggagttcaagaccagcctaggcaacctagtgagtctttcctagtgaaaattatttgtaattatgccagagtgctggtgtgtgcctctggtttcagcttacttggtaggctgaggtaggaggatcacttgagcacaggaaatcaaggctgcaatgagccgagatcgtgccactgcactccagcctgggagacagagtgagaccctacctcaaaaataaaaataaataaataaataaaaattcagcgatggagttgatggattcgaggttgagaacccccaatgtgaacccatttggaaaaaactcaaactatgttcttcctctgcttcacaacaaaaccacaacaatcaaaccagaagacttctgtggcctcaaaatccaaggagatttctccccatcagcaagcaaggaatcagttctgcagcagacaccagctgggtgtccaccaattcgattctgacactatctaccatgagatactgtcatcccacaggctaagggctcagcccccaaaactggtcccctttcagacaccagtcacaagtcccagcctctacaacttctgactgacgggttcaatttgggattcctacgaccccctctttgggttcgattaatttgctaaaataaaatggctcacagacctcagggaaacacatttactggctgattataaggatattccaaaggatacagatgaagagatgcctagggcgaggtatggggcaaggggcacagagcctccatgccctccctaggcacgaccctccaggaaccaccatgtgttcagctctctggaagctctctgaatccaccccttttgggtttgtaaggaggcttcattacataggcatgattgattaaaccactggctacttgccatcaacttaatcctcagtcccctccactccccaggggtgggagggtaggggctcaaagtctcaaccctctaatcctgccttggtctttctgatgaccagcccccatcctgaagctttcggtcaatcactaacatacaaaaagccaaaggctgggtgcagtggctcacgccggtaatcccaacactttgggaggccgaggcaggcagatcacctgaggtcaggagttcgcgaccagactggccagtatggtgaaaccccgtctctactaaaaaaaacaaatacaaaaattagccgggcgtggtggcgcgtgcctgtagttccagctactcgggaggctgcggcagaagaactgcttgaacccgggaggcagaggttgcagtgactggagattgcgccactgcacttcagtctgggcgacagagagagactccatcaaaaaaaaaaaaaaaaaaaaaaaaaaaaaaaaaaagccagcacttaagagattccaaggactttaggagttgtatgcgaggaaatagggacaaagaccaaatctgtatttgagaaaatcacagaaccgtatgagtatttaattcaatacagacatggaaactggcccaagcatttactcacagatgactgggcaaatccctggtgttattggtacaaactattgatcgagcccccaatctcattcctacccctaaaatatagcaaagtgaaagatcttatcacttatttggactgagattaacaccatcccataaactgcatggctttcaatcccagggctatggcgtgtgatgccacatagaatatgcactaatctctgcagcaattgagttgttagggtaaaggctcttgtttttgccttctttctctcacggccaagaaaattaaggaacagggacacaaaggatgaggtcggagcggaagtttaataagcaaaagaagaaagctctccccagcggagggacccaaaagagggttgccaactaggaggctgaatctgggggggtttattaactgggaaggggaggaacgtgggctgtcttgaagaaagcactacccagcttggccctgggaccttagcccgggaccaatcccaggctgaagtgaaagtttggcccaggaccaatcaggggctgaagtgaaagtttggcccgggaccaatcaggggctgaagtgaaagtttggcccgggaccaatcaggagctgaagtgaaagtttggcccgggaccaattaggggctgaagtgaaagtttggcccgggaccaatcaggagctgaagtgaaagtttgggccgggaccaatcaggagctgaagtgaaagtttggcccgggaccaatcaggggctgaagtgaaagcttggcccgggaccaatgagggggtgaagttatgattcaaagaggccgcgctcacagtctaaagcatgtccaaaaaaggaaagtggccgccggaacctgttagtccaagctgcaccgtttcgtaagcccccaccatttcacagaccctggtcagagggaaacattccacccgggtttgggctgtgcgaaacatccttcccaaccgcctgacttccttatcacatcctgctgggcaaaagcccaagaaacatccttatcaactttctcccaggcaacaagccataccgcccagacccctcctgcccaggcctgtaattaccccagcctggaagcggcagtgggctctggcatttagttggtccccgccatagagccgccaactctctctctttctttaaccctcgccttcccttcaaaatctaacagagcccaccgtgtacatgcccacaaaagaagcgactatttcgtggaagcccgctggtcacacaaaggacaaaggcgtttctatgttgggcctcggtcccttatcagtgcagctgaggaatgtcttcaggacaacccccctgtggagttttccttatgtatgcctgcagcctgatttttcaggctgtttctctgtttaaaggacttttaccaaggtcccaccctaactgcctaaagagttttttctctcaaggggacacacaaagtcccaatcgcacacatgcctccgcatatccacttacccactgcctcacagccaatcacactctcctctctcacatacaccaaggggccacacaagttgcacttgcacagccacagacctgcaactcacgcacacaaggtactgcacagacacgcaaagtcacacacccaccccgggacacgcagtccaaccacacagtcaccggttcttcacatccgcacgcacaacgagggtcgtccaggacacacacacccactccgggcgcgcacagtcacaagcgcccacctgatcacccagagtcagcaccacacagccacagtcacagaccacggagacccacggcagccatcgcgatcacacacgcaaactcctctcctcagccctccacacacaaaaggaccggagccggattcctcaccctcagcattctctggttccgctcggggccagcctagccaagttcctcaggactccaaggcgcggcggcagctaaatcggcacagcaaacggtcccgccacctggctaagaggaagccaaaatctcgcgagacgtggcgtcggcctgcgggatcctctgggaaatgtagtccagagcccgactgcgggcttccctatgcctctcatttccaagcctggcttgtttccttttaccgctcctctccaacgaggatcgcagagccctcatgccgagcggctcgctatggggccggctcgcccgctagagtggtcaggcctgattatccctggcagctctgttatctggggtaagacacaggaaaacgtgcttccggttctcggcggaagtagccccgaacggtagaaccgatgggaaatgtagtccagggcagaaaagcggtcaacccagccacgatgcgagccaaaggattcttggctccaagcctggtcctggctgttagtttggaactcatgcacccagatgctaactcgccctcagaatgcagaggggatgaaacactgaccggacaattcaatctgtatatgggtgagtccagggctcagtctgcattgcgcggaaaatgaaggtgaaggtggaggtgggacctgatggtctcgtcccggatagggttgaagaagtgggagaaaaggaatcaaaatcgtggatgggataagattgtgcgcgaatgctctctgggagcggatcgtggccgacgagggcccgaagatgctgccttgtgatcgcaggtgtgagtggaagctgtgtgagtgtcaatgtgagttgcctgtttgggagaccagcattgtatttttgtatcaggtagtaaccttggagccaggtatttgtaaaattatgataagagggcatcattctggagcatcgattttatttggaggttgacaggagagggaaaaaaacccctaatatctgataaacaacataaatagatttttatgttaaagtagttatatttattacggtctagaatgcaaatccaacatggcttttaaagcaagaaagattttttttatacaaagtcaaaggtattatttttatacacttactacaaaacatacaaatagtataccaagcctaagaatataaagagtctagctttaattaattgaatgtaaatttaaaaacaagcatctaataagtagtccttttcacacatcgaaaagccaatttcggaatttttttaaaaactcaaattacaaagtaacaaatatctggtgtcttagtaacttgaagatcagtactaatgattaagccagcttatatgctaatatgatacatgaaaaagcctgtatttcacaaatagcaaaccactaaaactttaattttccacagaagccattgtttcacaccaataattatgttaaagatcaagacaggctaaaagtttttaatgagcactgaatccattaaaacttggcaaatttttccacgaaggtagaattttaatttctgtttaaaccatgggtagatggtacacccttgtgagggtgtactgtaagtacttctaaggagctttatcagacttcatcccaaattatgtacctagtaaaagatgtaccaatgtctactttggaataagaaattattccttgtttgagcaaggattaagcagaaactgaaagaagtgtagtttatagcttcttacataaagtagatgggcacccctcaaaaacaaaccaatatcctggctccttaaatatcaacattaatctaaataatgtatagcatgctcctgtccaatctttcccgctcatttgtagtcttctcagatcgatgcttcattttagtcacacatttctatcctgcaagactgggtacctgggctttttgtctggttttgtaacactaggcagttttggccttactcaaaatataagactgcaaaaggcctgttttacctcaaccatacggcttcaggaaatggtctgtatttccaacagaaaagtggtatctaactctcaggatggtttctaacaactggatagatacctgggtctttgcggcctgtgatgcagcctaacaatacaggaccttgtgtgatcagctaggtctgctaaagcaaggggacatccatgttctagatttttatttatttatttttttttgagacggagtcttgctctgtcgcccaggctggagtgcagtggcgtgatctcggctcactgcaaactccgcctcccgggttcaagccattctcctgcctcagcctcctgagtagctgggactacaggcgcccgccaccacgcccggctaattttttgtatttttcgtagagacggggtttcaccg[137 bp omitted]ctgcctgtcctgaagagactctctttctcttccatacaacggctggcctctaccaagttaactgcttcgtggggggaaaatattgcctttcctttggtctgcatgttttaagggaaataccaaatacacctacaggagtttatcaataatagacaaggctgatttcaaactctttcaggagataaactggaggggaagacgaatggcaggagggtgaagaggaaactgaattactgtgcaaacacccgccactcaaatccgggtggttactgcagagtgaataacgataggtactatttcgtgtaaggcaaagtcctttgaaagggctcctagagcgtcaaggcctccacctgatgaatgaatgagtcaggcaggcccagctccacttcacggatgggaaaactgaggtacgaggcctcgctgaaagatgcgaggcagagcggagaaccagaagcaccacttctctcaggctgatgctctaatctcggctccccccgcccctacaatggcgtagacggcctccgccgcccgactcacacacaccctcccccgggaacggcaagtctcctcgggttccaaggacagggtcaaaagacaagaggcccgaggcgctcccgccgtgatttgcagccagataccgttgggagcgcagccagagagcgttgggagcgtgcgtacctccagcccaacatggcggcggcagcggccgcccccgaccccaagccctccctcagggcccgaggcttctcctcagggccttccggtgggcgggaagacagcgcaaccccgccaggcctttctcgtcgctgcgcctgctcgctgaaggagtcacctacccgacgagactaacggctgcggcgcggaagccccacagcccgccgagaaccaggaatacgagagccaggcggcgcggcggcgggacctgtactgagcaagaaagaagatttcaaagtaatttattgttatgagatccgtgcttttatcttgtctcagactcccaatgataggcacatactctcctctgtacatttaatgaaactactaaaatatttcgatttaaatcttccacctatttgttttctgtgtatcctacctgttcccgaccttgacattttcaaagaatacaggttacttattttgttttttggtggtggtgagtttttttggggttttgttttttggtttttggttttatttttggagacagggctttgctgtatcgcccaggctggaatacagtggcgcgatgatagctcactgcagcctcgaactcctgggctcaagggaccctcctgcttcagcctcccgagtagctgggactacaggcctgcgccaccacgcccgggtaattttttattttttgtagagatggggtgttctatgttgcccagtgtggtctcaaactcttgggctcaagagatcctcccacttctgctgcccaaagtgctaggattacaggcatgagccaccgcgccgggacagttattttgtagagtgttctttaatttggatgtacctcatcttttatgtatctttgggaggaataccacataactcatgtggtttatcccatcgagagacacacagtgtcaatgtgttccattcttggtgatgttaacttttattacttagtgaaaataattctaagagatttcaccactgtagagtgaataaatgaatatgtgggattcatcaatgaataagtaaaaggatgccaactggcaaaagaactgagttgggaggatggcttgagcctgggaggtcgaggctgcagtgagccgtgatggcaccactgccctccagcctgggtgacaaagcaagaccccgtctcagaaaaaattaaataaataaataaatacccagcacctgaacatctcgggcatttcctgtgcctcttatattgggtccctggtttcttggagcgtatgtcttttttttttttttcttggtttagcttctcatttttgtaaaaaacacgttcttattttgtttaccattttgacaaaggcgaatttgggttaaaactttgggacccttataagcttgacagtgtctgtattctacctcttttggatgacaccttaactaggtttgaaattttaggttgaatgtggttttcacttagaattttgaattatataacattgtctgctagcttacagtgtttatcttaaaatatgacaatttgatttgtgttctgttactgttctttgtctttcaaagcatttaaaggccaggctcagtgattcatgcctgtaatcccagagttttgggagtacgaggcaggaggattgcctgagctcaggagttcaaaaccagcctggatgacataaggagaccctgttttcataaaagtaaaaataggccgggtgtggtggctcacacctgtaatcccagcactttgggaggtcgaggtgggcagatcacctgaagtcaagagtttgagaccagcctggccaacatggtgaaacgctgtctctactaaaaacacaaaatattagttgggtgaggtggcatgcacctgtagtcccaggtactcaggaggctgaggcaggagaattgcttgaacccaagagggcatggttgcagttgagccaagatcgcgacactggactccagcctgggcaatggagtgagaccctgtctcaataataataataataataattttaaaaaacatttaaaattgtctcttcgtactagttttctgaaatttcacagaaatgtgttttggtgtggttcttgtttctttcgttgtacaaggtactcagtggatctttgtattaatattttgaagactcatgatctgtgtttctagaaatcgccttttgtttgttctgtgaagttttcttccattcatttttcttctctctttctgaaattctaaacatccttttagttggatgttataatttctgatttcttctggtagttttgtcatctttcatcccttttatttttatttatttttattttttgagatggagtctcgttctgtcgccagactggagtactgcggcgcgatttcggctcactgcaacctccgactccctggttcaagcaattctcctgccttagcctcctgagtagctgggattacagacacctgccaccacacctggctaatttttgtatttttaatagagacggagtttc[141 bp omitted]cagcatacttgttggagtcaaacatttgttactatccaattattattattgttatttgagatggccttttgctctatcgcccaggctggagtgcagtgctgcactcctagctcactgcagcctcaacctcctgggctcaggtgatcctcccacctcagcctctcaagtagctaggaccacaggtatgtgccaccacacccagctaatttttttattttttatagagacggggtttgaccgtctccaggctggtgtcgaactcctaggctcaagcaatctgactgcatcagcctcccaaagtgctgggattacaggtgtgagccactgtgcccagcccaactatcatcatctttatttttattattattattttttgagacagagtctcactctgtcacccaggctggagtgcgatggtataatctcagctcactgcaacctccgcccccgcccggttcaagcgattctcctgactcagcctcccaagtagctggggttacaggtgcttgccaccgcgcccagctaatttttgtatttttagtagagatggggtttcacaatcttggccaggctggtgttgaactcctgaccttgtgatctatccgcctcggcttcccaacgtgctgggattacaggtctgagccaccgcgcctggccactatcttattattaaataatgttacatgcagtgtctttggggagagaattcagtttttcagagacagactttgctcatttcctgatttgttcattttaattcaaatagtaaaagctttagaaaggcatgaggattgcttgactccaagagttcaagaccagcctgggtaacaaagcaagaccccatctctacaaaaaacactttttaaattagccaggccttgtggtatgtacctgtagtctcggctactgggaaaggtgagttgcgaggatctcttggggccaggagttgaaggctgcagtgagctatgattgcaccacttcgctccatcctatgcaacagagcaagactctgcctcggtcaatcaatcagtaaagatacttatcaaaagtaagcagacatgcaggcagatcacctgaggtcaggagttcgagaccatcctgtccagcatagtgaaaccctatctctactaaaaatacaaaaattagccgggtgtggtggtgggcgcctgtaatctcagctgctcgggaggctggggcaggagaaccacttgaacctgggagacggaggttgcagtgagctgagatcgcaccattgcactccagcctgggtgacagagcaaaactccgtctcacaaaaaaaagtaagcagacatgtctgctgcctacgtgaggtttacattctagtctgggagaaaaaaaagattttaaagtaaaaggagaaaatgaggtaattttatatcgtgatcaatactatgaaataaatcaataggtggtataagcagtaacttgagggatacttcccgtagcattgataggacaggtgactgagagataacccttgagctttggtggtgaggagtcagcagtgtggaagggtattccaagcagaggcacagttacactaaagatgctgaaaaatcagagagcacttggagcattccagaaacagaaagcagcctggtgtgactgaagcttagcaagtgagtgggaaattagtttagatttaggatgcagaggtcagcattttccatatcatgtgaggaaatgatagtgctgagattacaggcatgagccactgcacccagccccaaaccaagtttttacagtggtaagaatagatgttctgctatggtcagtgtctaaagattttacaaacaatatctcttctagtttgcagtcattattgaaataacaaacacgttctattgtcaggccttactatcactaactagtttcattgatctgaataggaaacttacttgattaatcagctactctggtattacctgacatctcattaatgcatctatgaattgaattgttgctcaataggagtgattgttaaatagtggcaatgtgatatatcactattgaagttatggcctctaatgtgggtcctatgacagtttcggcaactctgtaagcactacggggttttacaatgatttctgcaattttttttttgttttttttttttgagatggagtctcactctgtcagccaggctgcagtgcagtggcacgatctcagctcactgcaacctccgtctccctggctcaagcgattctccttgcctcagcctcctgagtagctgggattacaggtgtgtgccaccacgcctggctaatttttgtatttttagtagagacggggtttcaccatgttggccaggctggtctcgaactcccgacctcaggtgatccacctgcctcggcctcccaaagtgctgggattacaggtgtgagccaccgcgcctggctgatttatgcaattttataaggcaataatttcatcataatttgtttgcttatcctttttttttgttttttgagaccgaatgtcactctatcgtccaggctggagtgtggtgctgcaatctcagctcactgcaacctctgcctctcaggttcaagtgagtctcttgcctcagcctcccgagtacctggaattacaggtgcacacaccatgcccggctagtttttgtgtttttagtagagacaaggtttcaccatattgcccaggctggtctccaactcctgggctcaagggatccacccgcctcagcctcccaaactgttgggattacaggtgtgggccacctcacctggtcgcttgtccttcttaaataaggaagtaacagtgttacagttcaaaattctattttaaactttttaaatattctgcttctcgactttatcaggatgtttcttttttcgatgatccacaaatcttgatggtttcatagccctgtttgtaaaaaaacaaaacaaaacaaaaacaaaaaaaatgattattcataagaaacaagctgttttgagttaaatggggttttcaataaaaccgtaagctaggtcgggcgtggtggctcacgcctgtaatcctaacactttgggaggccgaggtgtgtggattgcctgaactcaggagtgacacagagtgagactccgtctcaaaaaacaaaaacaaacaaaacaaaacccgtaagccagatattcattcattcagatgtagtcaacatttttcattttcaacacttaacacaattaatgctaggttgaattattttcataatataactattttacataattcccaaagcactgaggatcaatcataaatactatccacaaggcagccaatagacacacacagaccacctctcatgtaactttgggatagagcattcaatcaagaaaaagtcttccgattatagccatcaatttgccatcattttgtagcactgatcttgcatagatttttttttttttttaagatggaggctccttctgtcgcccaggatgaagtgcagtggcatgatcagctcgctgcaacctctgcctcttgggttcaagcgattctcctgcttcagcctcccatgtagctgggattacaggcacgtgccaccacttccaggtaatttttttgtatttttagttgacacgaggttttaccatgttggacaggctggtcttgaactcctgccttcggtgatctgccttcctcggcctcccaaagtgctgggattacaggtgtgagccactgtgcatggcctgatcttgcgtggactttttatcttccataaaatgttcaatgctgcccataagacttgagagaaattaaataccaaggagtaaaattctgtgcaataggccaggtgcctggtggctcacacctgcaatcccagcactttgggaggccgaggcaggcggatcacttgaggtcaggagttctagaccaatctggccaacatgctgaaactccgtctctactaaaaatacaaaaattagccgaacttggtagtgcatgtctataatcccagctacttgggaggctgaggcaggagaatctcttgaacccaggaggcagaggttgcagtgagccaagattgcaccaccgcactccagcctgggtgacggagtgagcctccaactcaaaaaaaaaaaaaaaaaaaaattgtggaaggccacaaaccattgcaacaactataattcattttaccttcagtaaccaatgttcaccctcttaggggcaatatcacacccattaagaatgcttggccaggcacagaggctcatgcctgtaattccagcactttgggaggccaagggggggcagatccactgaggtcaggagttccagaccagcctggccaacgtggtgaaaccccgtctctactaaaaatacaaaaattagctaggcatggtggcaggcacctatcgtcccaactactcaggaggctgaggcaggagaatcacttgaacctgggaagtggaggttgcatttgagctgagattatgccactgcactctagcctacatgacagagtgagaccctgtctcaaaaaaaaaaaaaaaacttacagtaaggctaaataaatatacaaattaggtgtgtgtgttagtatacatacatttcctagttctgcccactaagagggcctagaagcaatgacacaccagtagcaatgagcacacttgtcaccctgatcttggtgattttgtttttgttttgtttttaaaaatagagatggggtctcactgtgttgcccaagctggtctcaaactcttggcctcaagggatcctcctgcctcagcctcccaaaatgttgagattacaggcctgagccacctcacccagcccaagattttggtgctttgtaaataaaactcttcaataaaagaaaccaaggatctttaaatgaatggtttattccacgtctgggtcagggaaaatatcaaatgaatcaaaacattttatggtgccagaaagttgggaattagtcccgtaccccagccccctgataaaggcatgctataaatggaatacaggagccaacctaaagaaactcccaaggccagtgttctttttttttttttttttaagatggagtttcactcttgtcgcccaggctggagtgcggtgatgtgaggtgtgatcttggctcactacaacatccgcctcccaggttgaagcgattctcctgcctcagcctcccgagtaggtgggattacaggtgcccaccaccacactcaactaattttttgtacttttagtagagacagggtttcaccatgttgggcaggccggtctcaaacttgtgacctcaggtgatcgccaagcctcggcctcccaaagtgctgggattacaggtgtcagccactgcgcccggcctactttcttattgttttcagtatcataaccatgtacatgttcaattgcgcatatactatgttctctacaaaggtgcagtttggacctgactcatctctatctccagctcctaggaacataggaggtactcagttacatgcttgaaaactgctggggaacagaaatataagtctaaggaccatgagtaacattcattttcatctaccacaaacagatatacaactcatctgagccttggtttgattcattcattcatatgttcattctttaatttgtgaagtacttataaatgtcaatacacacttgataatgtagtggatgctggaaattcaggagtatccattcaacttccttacgagatctatggaataaagtatgtactatgctcaaggtgagcacatggttctagaaaaagccagaggaaaagtagctcatttctggaaaaggtgatatctgagctgaaaaaatgttttcacgtagaagtgaacaaggttactaaaataagtactactcaggagtatgataatgagcacggacgtctgagtagaatagaggtaaaggtcactgggattaataaagcaaggtgtggccaaggcgagcggattacctgaggtcaggagttcgagaccagcctgaccaacatggagaaatcccgtctctactaaaaatacaaaattagcccggtgtggtggtgcatgcctgtaatcccagctacttgggaagctgacgcaggagaatcgcttgaacccaggaggtggaggttgcagtgagctgagatcacaccattgcactccagtctgggcaacaggagcagaactccgtctcaaaaaaaataaaataaaataaataataaagcaaggcacacggcctgatcttgcctagattttttatcttccatgaaatgattaatgctgctcataagacttgagagaaattaaataccaaagagtaaaattttatgcaattggtcaggcacggtgcctcacacctgtaatcacagcactttgggaggctgaggtgggcagatcactggaggtcaggagttctagaccagcctggccaacatggtgaaaccctatctctactaaaaatacaaaaattagctgtggtggctttcctctagaagagctgggtgcagtggctcatgcctgtaatcccagcactttgggaggccaaggcaggtgaatcacttgagcccaggagtttgagaccagcctgggcaacctagagagacctgtctccacaaaattattggggcatggtggcacatgcctgtggtcccagctacttgtgagtttcaggtgggagggtcacttggacccaggaggtcaaggctgcagtgagctgtgatcacgcaactgcacttcagttcggatgatggaggtgagaccctgcctcaaaaatataaagtattggtactctacaacaagagcattgcattgtcacccatgtagacaataaattgactcagaatcacaaatacttatattggggacctgtatgtcaagccctaggaagagtgccaggtcatcatctgggaaaggaaatattaggagtattggggtgtgaatagtactgcacagaattccaattcatttcaaaatatatttcacagattatcacaaaccaggaaatgagttgtgtgtaattttctttgtttttgagacagaattttactcttcttgtccaggctggagtgcaatggctcgatctcggctcacctcaacctccacctccccgaaacctctgcctcccaggttcaagtgattctcttgcctcagcctcccgagtagctgagattataggcatgtgccaccacacctggctaattttgtatttttagtagagacggggattc[143 bp omitted]agtgcagtggcatgatcccggctcacttcaacctccgcctcccgggttcaagcgattcttgtgcctcagcctcctgagtagctgggaccacaggcatgggccatgacactcagctaatttttgtattttcagtagacacaaagtttcaccatgttggccaggctggtctcaaactctgggcctcaagtgatctgcctgccttgacttcccaaagtgttgggtacaggcatgagacacggcacccagccagttgtatgtagttttaatcaaacaactccccaaattcaatgaagacaccaattgtattcatatcctgccctactagtcacccaagtgaatatcatcatccaataatgaaatacctctaaaacaaccacatgctggagggctgggggttaaaggaaggaaatatatgatttttactatttgctttttttttttttttttttttgagatggtcttgctctgtcgcccaggctggagtgcagtggtacaatcatggcactgcagcctcgacctccccgggctcagatgatcctccctccccagcttccaaagtagctgggattgcatgcgcacaccaccatgcctggctaatttttgtatttctttgtagaggccacgttctgccatgttgcctgggttggtttcaaactcctgggctgaaatgatccacctgtcccaaccttgtgaagcgctaggattacaggtgtgagccaccaggcctggcctgttttattgtttaatactttaacatttgaggcttccaattgcaagcaacagtctcagcctttggtaattaagccaaaaaggtaggtagctcacagaatgattgggagggatagaaatccaggctccaggctaggcttctaggtgctatgcccaaaattatgccatgggacaggtatagtgagtaagtcacctgcctctcctgctggcacaagaacaatgggaattgccactgttgccacgctgatgtgctgtctgcacctgatacacgatatatgagcaactactcttgcctgtgaaagccggaacctctgcctccacccttgcacgcaagatgaattcatgtgaaaccttaagttgatcaattttgaaatatcttgatatgagtttcattggtgaaacttagacacatgacttagtcacgtgccctacttcaaaagagcccaaggaactgaagaaatttcctagagctggcaaaaatgttcaaaagggacagggagtggtggctcatgcctatgttcccaacattttgagaggatgaggtaggaggatcgcttgagcccaggagtctgaggctgcagtgagctgtgacagcaccactgcactcaagcctggacaatggagtgagcccttgtctcaaaaaaattttaaaaatgttcaaaaggtactgagtggccagaaaaacagaacaaatgcctcctatcttctatcttttgacatctcttcagtaacatacacctttcttccataatcaaatttaacatcttcatctacaacaaaatggtcttgccccatatactgccactacctcactaacgtaaatgcaaagttcctccaagtgtcataagttactgtgaccattttctttcttttctttttgacatggagtctcgctctgtcgcctaggctggagtgcagtggcgcaatcctggcttactgcaacctctgcctcccgggttcaagcaattctcctgccttagcctcctgaatagctgggattacaggtgtgcgccaccatgcccagctaatttttgtatttttagtagagacagggtttcaccatgttggtcaagctggtctcgaactcctgaccttgtgatccacccgcctcggcctcccagcttttagtttaattaggtatcacttgtctatttttgtttttgctgcaattgcttttttggaaacttagccaaaaattccttaccaagtccaatgttgagaagagtatttcctaggttgtcttcctggatttttatagtttgaggtcttatatttaaatctttaatccattttgagttaatttttgtatatggtgaaaggtagggggctcagactcaatcttctgcacatggctggccagttatcccagaatcatttattgaatagggagtcatttccccattgctcgttttttttgactttgtcgaagatcagatggttgtaggtgtgtggctttatttctgggttctctaacctgttccattagtctatgtgtctgtttttgtaccagtactataacattttggttactgtagcctagcagtatagtttgaagttgcatatatgatgcccatcagcagtggactggataaagaaaatgtggtacatatacaccatggaatactacatagccttagaaaacagacaaacaaaccaaaaaacccaaaaaacctgtcctttgcagccacatggatgcagctgaagtccattatccgaaatgaattaatgcagcatcagaaaaccaaatacctcatgttctcacttataagtgggagctaaacattgagtacacatggacacagagatgggaacaacagacactggggcctgcttgagtgggaagggtggcatgaggctatgggtcaaaaaactgttgggtactgtggtcactacctgggtgacgatatcatttgtacaccaaaccccagtgacatgcaatttacccatgtaacaagctgcacatatcccttaaacctaaaaatagaaaaaactaacaataaataaatgaggtatgtctaattgttgaatgctatgaaaggtaaccaatggagatattgaacatcgtgagagtggcctggcgctgtggctcacacctgtaatcccagcactttgggaggctgaggtgggcggatcacgaggtcaggagttcgagaccagcatggccaagatggtgaaccctcgtctctactaaaaatacaaaaattagccggttgtggtggtacgtgcctgtaatcccagttactcaggaggctgaggcaggagaatcacttgaacccaggaggcggaggttgcaatgagccgagatggcaccactgcactctagcctgggtgacagagcaagagtatgtctcaaaaaacaaaacaaaaaaaaggaaaatagtgagagcaccatatctggaaagtggtccaggcactggggtgaggggtgagtgtcagccaagtcatcagctatcagaacaggaagtcatcaggtaatacatcaagtggatatattgagaaggagcaggatctacctattatataacacagagataaccactcagatatatagattagaaatagtttagaaaatttaaacatctgattattcagggagtagacctgggagcattggagaaatgatggggagtagactgcatggaaagctctttcttagtatgtgatttttcaattatgcacataggtttcttacataacatgtaaaattcaattaaagaagaaacaaagttgtgttctggggtcccaaaggttcagtgattaattagaagaactcacaaaactgagtcaagctgttattctcatggttatggtttattacaacaaaaagatgcagattaaagtcagcagcagcaaaaggtgcgtagggcagagaccaggagagaccaagcgcaagcttccagttgccctctcccagcggcatcatgtgtacagtgcttaattcacccagcgatacatggcagaaagtacagaaaatactccccagcaaaaagcttacctgagccttggtgttgagggttttactggaggttggtcacatggacaagagcacccatttggatgaccttagtttctctgtctccacccttcccaaggtcaagctgacactgcatggtccagggtccccacaataaatcacattgttaactcctacagaggcaggatattccaaggacttagaggttatttcctgggagatggactagagtcaaacctttctttggagtgtgcggggtttggacaattcaggcctacttagtttccttgactgcacacaagtgatagtgagtatgtaggaaatgaatagtctcatatattgctggtgaaagtatagtgttgtataaacctctggaaagaaatcgagtgtgtagtgcataaacattatatttggtttgtttttgttcttgtctgagacagagtctcactctgtcacccacgctggagtgcagtggtatgatcacaactcactgcagcctcaacctcctgggctccagctatcctcccacctcagtctcctgagtagctgggaccacaggcacgtgccaccacacccagctaatttttgtgtttttggtacaggcagggtttcaccatgttgcccaggctggtttcaaactcctgggttcaaacaatcctctacctcagctccccaaagtgctaggaatacaggagtgagccactgcacccaacctatatttgtatatacattaaattgtatatgctaagccgggcacggtggcttactcctgtaattccagcactttgggaggccaaggtgagtggatcacttaaggtcaggagttcgcgaccagcctggccaacatggtgaaaacccatctccactaaaaagacaaagttagctggacatggtggcagatgcctgtattcccagctacttgggaggctgaggcaggagaatcacttgaacccaagaggtggaggttgcagtgagccgagatgacaccactgcactccagcctgggtgacagactgaaattccatctcaaaaaataacaaaaaattgtatatattattgtatgtgtgtgtatatattaagttgtatatacacatattaaatatatatacatatattacattttatacacatacatttgtttcctcatgcaatttgtttcagcagaagtaaaaattaaagatataagtaaaagaatatttacagaagcattatttttggtggcaaaagtactttaatatctttaaatgctcatataatggaagatagtttaactcttacaaagaacgagttagttggccgggcgcggtggctcacgcctgtaatcccagttttttgggaggccgaggcgggcggatcacttggggtcagaagttcgagaccggcttagccaacgtgatgaaaccctgtctctactgaaaatacaaaaattagacgggcgtgatggcatgcgcctgtaatcccagctacccggaggctgaggcgggagaatggcttgaatccgggaggcggaagttgcggtgagccgagatggcgccactgcactccagcctgggtgacagagtgagactccctcaaaaaaaaaaaaaaaaaaagtttgtggaaccaattccaatccagtccaggggagcacacactggcgaccaacatccccgctcaggtcccttcagggtcgagagagtgcgcctggaacagactgggaaactccagcaggcaaagtaatgtgccaggaataaagacaccgcctgacacattctccatgttccttacacccaccacgcttccatccggctccaactctgtcctctccccaggagcctcagattaaaatactgcaaggaagacaccgattctcaaagtcacaggcctaggaatctgagctacaaagaaaaatgagcccctgctcccccaactcccccctactcccctcagccccactgccctgcacctgccccctcctccgtaatttgaactgtcctcccagaagctggagagacggcccgcctgtgaggaaatagaggaccagcatgcggcaaatgcctgggttaggtaggagcagacggcgagattagcgcagggatgtaagaaacaagtggctctcagaccaaagaagactccgcggcagacggcacactaggccttcatagaggcgtgcgctggacaggagctcgccagttaccgaaagaattgtctgagaaaggctctgatctgacccgaaaggcccttggttcccacggcaacgcctcagcgtctggcagtaacaggctctgtgcccgggctctctggatctgcaggtcccgcctccgccagcctctcacagcccggaggcacctcccattggcgcctgacgggttggttagggcagcttctcttccggctgtgacaaatccagcctgaggagcgctcctgtgtctttcttagttgtttcttcccgcccacctgcccctcaaagccacaacccacttgcacgccaccgtgtggacaccttaaagcgaccttctagctctgaaccccgctgagggaatggtcaccttcgctcctattagatggcttggcccaaaggacctagcgacggcccagacaaaaatttcttcctacaagctccatgtgtctgtggtctctaagactcaaaaacaaacccaaaagaaaaagccaacccccaccccccgcaaaaaacaaacaaacaaaaacccccaaaacgccgccaacccacctttcacgagaggagtccttgagaagagcctctccagccaggaccaggtaagggaatctgtgcacttggccagacccagaacacacagtggcagggacctgacagccacactcttaccccatagaatctccaccactgacacacagatcaggatgcgtcaccatgagagatgacaccgcaaatctggctctcacggattgattccatactgtctcatcgatcccacacacatcccatcactgacaccagattccctcatcactgaccctacatacccacaatcattgattccatggacctcatcactatcccaaagaccacctatcagtaatctacagaccctcctctgtcaccccggggacctcacagattccccatccccgattccaggatctatagaacctcatctcttacccccacagacctattaataagagggtacattcatggaagactgtgttgaccattttacacacccactgcatgtgtgtatgtgtgtgtgtgcgcgctgattaatggacttaggtaaactttagcgttttggtaggcaatgcagtttttcaatgccttttctttttctttctttttcttaacatctttaaaggccttaccccagtaagtgtggattgcaattcattaatgcctatcctttattgagtccttgtcatgcatatttattaataataattcataattcttacaactcagagacaccagagactcacatgagaagaatggctgtggatttttatttacttatttattcattttggtttctgtagattataaaagtcattcatttgcatcaagtcaccaagtgtatactttgttttctaaaaaaaaattctaattacaaaaaaattgtttttagacagggtctcactctgtcacccaggctggagtgcagtggtataatcatggccaccattgcctcgacatcctgggctcaagtgatcctcccacctgagcctacctagtagctgagaccacaggcatgtaccaatacttccacctaattaaaaaaaaattttttttttgtagatatgtgggtctcactatgttgcagagactggccttgaactcctgggctcaactgatcctcccaccttggcctcccagtgttgagattacaggtgtga[140 bp omitted]cggtgaaaccccgtctctactaaaaatacaaaaaattagccgggcgaggtggcgggcgcctgtagtcccagctactcgggaggctgaggcaggagaatggcgtgaaccccagggggcggagcctgcagtgagccgagattgcgccactgcactccagcctgggcgacagcgagactccgtctcaaaaaaaaaaaaaaaaaaagagtaactttgggacctaatgtaaaatttccactgagatgatgcgtcagaaattaaggtagaataagatggtcctagggcatctgaaacaacggaaactcaatcttgggccaggcgcggtggctcacgcctgtaatcccagcaattgggagaccaacgtggttgactcacttgaggtcagaagttcgagaccagtctagccaacatggtgaaacactctctctactaaaaatacaaaaattagccaagattgcgccactgcactccagtctgggcaacagagggagactctgtctcaaaaaaaaaaaaaaaagaagaagaagaagaagaaacaaaatcttaatttcttcatcaagtgtaaaactgtggactggactctggaggaataatacataaaaagacacacaggcaattttttttttaagttttattgagaaatattaataacataccacagaagccacccattgaaactgtaaaattcaacggttttcagtatatttgcacagttgtgcaaacagcaccacaataaattttagatcattttcattaccctgaagaaaaccgcatatccctccatttccccccaactcccctaaccctgggccaccaccaatgtactttgtttctatgtattggtctattttggacattttatttaaatggaattacaaaacgtggtctttcgtgactggcttctttcacttagcatcatattttcaaggtttactcaatgtttcatgtgcagagggggcactttatgtaaggataaacctaggagggaggtgcttattgattttgaaacttcactccaatattgtaaaagggaaatgattggtttcaaatagaggaaaaacctattcgggctaaaatcctcccttttcgccagtttgtaatgtggggttttattgcgaagaatggcaaggtttttatgcatattttctgcaaattctccctgtgtttggggaacagtcacagaatgtggaggtgtgggcttctggactctgtggctggagattcaagtccaggagaactcaggtcccaggttaggcagagaaaaacagtccaagagtgccgatagaactctttgaaatagaaaatttaaaatgtcccctcccagagagtcccagataaccacacaaaagaggagtttgctgagctggtccgtcgcgattgtccaataagatgcagacagactgggaaagaaaggagtttatttctgcaaccggttagacggagaagccaagtaactcaccagaccaactcaaagtttcaagtttttttctagtgcttatatacatcttaagctcaatgctatggtgggactgcacctacaagcagaaatgttgcattcaatcaacatctaatctttaactacggtctagggtctggaaagatttctctagagtcttggaaagtttctgaatcttaagacaggcccaggtgaatgtgtaagaatactattattattcgatcagactttagggtctgagaggacccaggcggggtcttaatgggttcgttttcgcattccatccctgatactcaggcaccagtttctcaatttctttaacgtttaacttatgcattcatcaaaattatagtaaagtgttaatggaaactgttctggttgctaatggaaacctggcctgccacactgccgaactgaagcccactgcagaacactgaaaatgcctgcaaacactgactttactgacaactcttaaattacagaaaatcaagttcatgctgcctctccgatctgtcctacggaattgctagttacaaacgtgcacattgtcctaggttcggttttgcaaagatggagcccttcagcgaaagcatttgtttgatttcatgcattaatgtttcctctatccatttcctttttacttatttatttaaagacggagtttcccttactgcaacctccgcctcccgggttcaagtgattctcctgcctcagcctcccaaataggtaggattacaggcatgcgccgccatgccccgctaatttttgtttttgtttttttctttttttttttcttttgagacggagtttcactcttgttgcccaggctggagtgcaatggcgcgcgcgatcttggctcaccgcaacctccgtctcccgggttcaagcgattcttctgcctcagcctcccgagtagctggattacaggcatgcgccaccaccccggctaattttgtatttttagtagagacggggtttctccatg[140 bp omitted]caggatagtctcgaactcctgagctcaggcaatccagccgcctcggccgcccaaagtgctgcgattacaggcgtgagccaccgcgcccggcctattttattttattttaagacggagtctcactctgtcgcccaggctggagcgcaggggcgggatctcggctcactgcaacctccgcctctccggctcactgcaacctccggctcactgcaacctccaactctccaactctccaactctccaactctccaactctccaactctccggttcacgcgattcttgtgcctccgcctcccgactaggtgggattacaggcgcccgccagcacgcctggctaatttttgtatttttagtacagacgggggtttcatcatgttggcggccggactgttctctaactcctgacctcaagtaatcggcccgcctcggcctcccaaagtgctggaactacaggcgtgagccaccgcgcccggccccatttcctttattttattttactatgttcagacggagtttcgctcttgctgtccaagctggaatgcagtggcgcgatctcggctcaccgcaacctctacctcccaggttcaagcgattctcctgcatcaacctccggagtagctgggattacaggcgcacgccaccacgcccgactacatttcctttattttatttttatactttactagcctgtttgttgatcacaagactggcggtgcacaaggttgggtctcggtgttcaccgggcggtgggcgtgggcgaggtgggagggtctccagcgcctggtgctaatctccaagaaagtgcaggaaacagcaccaaacgtgattgcaaagttttggtttggcgcggcgggtaggcgttccagcgcagaaatgcgcaggaaagtttctgctgtgcttgtaggaaggtcggccacaagcacttcttttgttttttgaaaccgagtttcgctctgtcgcccaggcaggagtgcagtggcgtgatatccgctcactgcaagctccgcctcccgggttcacgccattctgcggcctcagcttcccgagtagctgggactataggcgcccgccaccacgtctggttaatttttcgtatttttagtagagacggggtttcaccg[134 bp omitted]cctgcatatccattggctgaaagctccgtctattttagggtgactgagagcgtctcttccttctgtgttgcctggaaacggactgttcgcctagtaacatctgatcacgtttcccattggtcaccgtttccggaagcccgctctcccgtttccggaatccccgcaggcgctgggtctgcagatggcgtccaggtacacagtggcgagtgtgattccgcagtcttgggctgtttggccaagcgcccgccggacatggtacgccgaagggtcatcggcgtggagtcctcgctttcagcgtccgcggctgggaaatcggccatcgctacggcgggaactgggactcgggctgcgtcccggcccttccacatcggtccaccgcactcgtgggcgcccgcattggtgctgacataatttcctgacctctgacccgtattgtctcgcgattaaaggtaaaaaacggggctttttcatcccactggggtaaaacgcccttttatttctagccaggtgttctgttgcagaacgcctcgaagggagggagtgaccggcaggttgaggtttattaaataaaatacattcctggtttatattatgtttataataaagcaccccaccctttaaaaaatctcacgttttgccagttgcattatttagtggactgtctctgataaggacagccagttaaaatggcattttgttgttgttgctaattaaaccaatttttagttttggtggttttcctaacagcagcaacttctcaggctttataaaatcatatttcttgtgggaaatttctgtgaaaggcgcagcgagttagtttggaattgttttaaaggaagtaagttcctggttttgatatcttagtagtagtattttccccagtgtctttgaaatcttatttttggagcacgtatgtagagtaacttttgtgaaagaaacaacttttattttttattattatttttttttgagacggaatttcgctctcgttgcccaggctggagtgcaatggtgcaatctctgctcactgcaacctccgcctcccgggttgaagcgattctcctgcctcagcctcacgagtagctgggattataggcatgtgccaccacgtccagctaattttgtatttttagtagagatggggtttctttatgttggtcaagctggtctcgaactcccgacctggggtgatctgcccgcctcggcctcccagagtgctgggattacaggtgtgatccaccgcacctggctgatttcatatatatatcttcctaaatcctttaaaaagttagtggatctcttacttttgtaggatttatttcatagtgtgaatgagacacctgtaggctccaggtctctgtcttcatgaggtgtgaagattcagtgctttataaaacagtccccacattcttcaaaggccttgttcttaattctcagcacgcttgtgcttctgacattgttactaaaattaagctaagtttttctggttatgtgagagctgtggaaatgtccagcgttagccactaatgtttctccttgatatttctccgtatcttaatactgactctcaatccattactcagatgggtgtccttttcctggatgtctggaaactaagcctggctatccctctgacctccctgccgagctaccatttttttcctctctcttttcttgtctacacttgagttggtaacctcagctctttcatgagcaaccttgatgcctttgactccttctgagtttattacccacagttccatcagccaagtttaggggcccatgagaagggctcgtgtaaattttcacattcctctaaccaaaatgtagtgtttccttccatcttgaatataggctgtagacccctcgggtatggggtattgttggcagtgagaccacagcagtttttatgtcatctgacagcatctacaaatagccttcatggttgtcactgctttccaagacatttccaagtaacagttcccagtgatgatttactactcgctattgttacttaatgtgttaaggtggctgtcataggcactattactatgtcagaaattacaccaaaatttagtggctcaaacaatcattatgttatgtggattctcatgctcacagtcaggatttcagatatggcacaagggtagcccacttgtctctgttccatgatgtctggcctcagcacggaagactcaacggctggggtctgcaaccatttggaggcttgttcccttgtggggaaaacaaagagagatcagactgttaccgtgtctgtgtagaaagaagtagacataagagactccattttgttctgtactaagaaaatttcttcggccttgagatgctgttaatctgtaaccctagccccaaccctgtgctcccaagagacttgtgctgtgttgactcaaggtttaatggatttagggctatgcaggatgtgttttgttaaaaaaaagtgcttgaaggcagtatgcttgttaaaagtcatcaccgttctctaatctcaagtacccagggacacaatacaaagatttctcctcatgcgatagcctgagatatggcctcctgggaagggaaagacctgaccatcccccagcctgacacccataaagggtctgtgctgaggaggattagtaagaggaaggcctctttgtatctttgcagttgagatacgaggaaggcgtctgtctcctgctggtccctgggaatagaatgtctcagtgtaaaacctgattgtatgttccatttactgagataggagaaaaccaccttagggctggaggtgagacttgctggcggcaatagtgctctttaatgcactgagatgtttgtatacgtgcacatcaaggcacagcaccttttcttaaccttgtttatgacacggagacctttgttcacatgttttcctgctgaccctctccccactattaccttattgttctgccacatctccctgtctgagatggtagagataatgatcaataaatactgagggaactcagagaccggtgccagtgcaggtcccctggtcccacttttctttgtctatccttttttttttttttgagatggagtctcaccctgtcgcccaggctggaatgcagtggtgcaatctcggctcactgcaacctccgcctcccgggttcaagcgattctcctgccccagcctcccaagtagctgggattacaggcgcgcaccactatgcccagctaatttttgtatttttagtagagacggggtttcacta[137 bp omitted]tctcgtcccacctgacgagaaacacccataggtgtggagggggcaggcaccccttcagttgggcaaatggtctaatatttctttttttttttttttgaaacagagtcttagtctgtctcccatgctggagttctgtggcaccgtgtcagctcactgcaacctccatgtcctgggttcaagcaattctcttgcctcagcctccagagtagctgggattacaggcgcccaccacgcctggctaactttttaatatttttagtagagacggtttcaccatgttggccaggctggtctcgaactcctgacctcaggtgatctgcccgcctaggcctcccaaagtgctggaattacaggtgggcgcttggccaaggggctgatatttcttaagggcttcccctgagaaagaagaagccaaacctactcaggcaaatcttgtttatttattcttctaggtccagatttggaacaaatctctctagagattgaacaggtaaggctcacctttcaataattacaccaagaaaggcctagctgatgacttaagctatggttttgggcagcacgagagtggtcaggtggacagtagggaagtctatacaacccaaagggaaaagagaaaaggcccatgagaaatcagggcaaattgccacagtgtgtttttcttgatggtgtcactgaaatgtgggttaccttcccactgtgtcccccaaaggacatgaggccacagactgcagtgcccgtgagcagaggagctgtagggacggtggtttgatcgctccattcaaatgcacaccccggtgcctgtgcgtctcttctgatgcagggccccagtgggtaagctctgtgcttctccacacagtggattaggagtggaaacattctgtctgtttagcgcttgatggtttggtggtgacctcatgtcatggtgattagagccagtgatcctaacagtttaaaattgttgagcttgtgggtaggtatttgggagatagtatatgtgttacctagtgtttgtcatccgcagtggttttgttactttttgcataaactgcggagaaagtttactaactgcagatagtagagaaattaccagtcactctaaaatcctcccatttcttggtctagagctgcgcctggatccctcagcagtgaggagacctgaagaccagaggaaacacagcaagtaggccctttaaaccactcacctgtgttgtcttccaatttattctgttttattttgtttccatcattttaaggggttaaaatcatcttgttcagacctcagcatataaaatgacccatctgtagacctcaggctccaaccataccccaagagttgtctggttttgtttaaattactgccaggtttcaactgcagatatccctggaaggaatattccagattccctgagtagtttccaggttaaagtcttataggcttcttctgttttgaggaggagttcctgtcagagaaaagcctgatttggatttttaactttaatgcctgtgaaatgctataaaaaataattttctacccctaacattaaagtactgttagtgagaaattaaaattccctcaggaggattaaactgccatttcagttacctgaattccaaatgttttggttgttagaattttctttaatgttcatgaggaagtgttttatattttctatcaagattaattctctttttttttttttttagacggagccttgctctgttgcccaggctggtgtgtagtgatctcagctcactgcaagctccaccttccgggttcacaccattctcccacctcaacccccggagtagctggaactacagcctcctgccaccacgcctggctaattttttttttgtatttttagtagagacggggtttcaccatgttagctaggatggtctcgatctgctgacctcgtgatccacccgcctcggcctctcaaagtgctgggattaaaggcgtaagccactgcgcctggctgttttttcatttctattatgatttgtcctgtggaatgtcagtgacttagcggtatttttatcacacgtttataaagctgaatagttttgtatgtcagctcagcacccttagtgtcagccatgctagtctcctgctgtgcatagatcgaggcctgtccatacccgaatctcctgggttcccactgtcagcacctgaaggtacccaccagatgtgtctgtcacttccctacatccacctctattgtggttctcatgtttctgcctccctagagaccatttctctgtagagcagcgctttcgaatagaaatacaatgccagacacataagttgttttagattttctagtagtcactttagaaaagttaaaaagaaacaggtgaaattaatgttttatttcacctaaaatgttagcattatccaaaatatcacttcaacatcttatcaaaataaaattattaatgagattggttaccgttccgataaataggtgaactgagagcatacacagtagtattctgttctaatttctgcttcactgtgagtgtcttgacatagtcttaaaagagtattgctgtgaaatattatacatgtaactcataacctctacaattctgcagttgtaattggttgtcttacctaataatcagttgctttgcttcataatatttaaattggcatctctattttccaaaaggcataaatactagtatagttttttagttaagccaggagaaagttcactttatttacataacttatacgtaaaaatttaataaatctccctgcttcttttcttttgcatcataacaaccactgaaaataatatttctatggcagttgggggtaaatggacaatagcttttgtgaccagaggtgaatggcccagggtctccagcactccaggtcccactgagcctgccccacagctgagggcatcggtatttccacacacctataatgtacagtgccccagaacagagatcggatgctctgctttattcagatggggtgttgagagtattgtcattgtaattgaattagtaagtaagtatttatacactgttaaaatctggttggatttgtgtcccttcacaaaacaaattgcttaaatgaaaccacagagttaacataattgactacatctgcttctatgagctgctgttctaacatttaactagaatctaatttgaaattagtcaataaaaagtttattcaactgaattatatttagactttttgttgttgttgttgttttgagatggagttttgctcttgtagcccaggctggagtgcaatggcgcgatcttggctcactgcaacctccttctcccgggttcaggcgattctcctgcctcaacctcccgagtaggtgggattactggtgcctgccaccacgcccagcgtgaagcactgcacccggccttcatagattattttactttattttagttacttatttttatgactttattgttataaaaatgcttgtttttaaaaaaaatcaaccagtataacaaagaacaaagaagataatcaacaagcattcccacctccatgatttagaaataactgtcatcaatacaggaaaataccatgccattctttctcctctaggcacatggacagacagatagaaggatgggaaaatagatagatggtccaggcacaatggctcacgcctgtaatctcagcactttgggaggccaaggcgtgtggattacctgaggtcaggagtttgagaccagcctagccaacatggtgaaaccccatctctacttataatacccaaaaaaaaaaaaaaaaaattggccaggaatggtggtgggctcctgtaatcccagctactcaggaggctgaggcaggagaatcacttgaacccaggaggtggaggttgcagtgagccgagattatgccattgcactccatcctggacaacagagtgagactccttctcaaaaaaaaaaaaaaaaaaaaaaagaacagttgatgaaggatggatagactaaaacaatgctgcattaatgaggctacgatagtgcgtatttgtataaaaagcattaatttgcatttgttggcattttgaagctctgttgttggatgcatacacatttagtatctatatgtcgttatgatttgtaaatcatgtaatgcgtctctttacataatgatttttaaattattttgtaatgtttctcattacgttatgtaatgcccttattaactttccttggaaatcttttttacccgttatccatacaaccactcttgctttcttaatactgatgttagcatgatataccttttttcttttgttcgttttttattttaactgtcaacttacctatgctgtgtttgaagtgaggttcttgtacgtggcatgtagttgggttatgttttattttatttaaactgccatctctgtcctttacatcaaaggtaaattgatgttcttagaccacgtacctttaaagtaattcttgatgtgttaaagcttaattctgccattttattatttgttttctgtttgtttcctgtttccctgttctagtcttccactggatacttgatcacttttaaaattccatcttgtttaatttatactgtatttgagtatatcacttacatagttcttttggtggttgctctaggtattacagtatatatctataacttagcctattgctatccacatttaagtacttgcagtggagcattgaaaacttactttcatttaggtctttaccctctctaccttttagatataattgtttccaatgtttcctttttcatattgagcattccaacatatgcttttataatttttgcttgagtcatcaaatatgatttcagaaattcataagaaggagattcttacggctttgtggccctagatatactgcctgtagtatactgaccagtggctccagacctcttttctttggtgggagagggtctggcacttgggtgggccttgccaaaattttctttctctgttgttgaccatcatctccctctgaagtttactgcctgacctgtttctgtgtttggttactccaggtgaacttgtgctatttctgttgtctttaggttgagagtggtagaacttttttttaacttcattctatcatctttaccccaaagtcttacatttttaataaaattaaaagccaccatttttggtcctttgtcagtgacagctatctaaagaaagacattagcagctttttagatatttaaggaagtttctgtcattctttggttgtcatatctttaggaaacatttttttccctaaattactccaaattaaattaatcctacagttggtctaatttaattttttttttttttttttttgagacagggtctcattctgtaacccaggctgaagtgtaggggtggaatcataggttattgcagcctcaaactcctaggctcaagagatcctcccacctcagcctcccaagtaactggaactgcaggtgtgcaccgccatgcctagctaatttaaaaatttttttgcagaggtggggttgggtctcactatgttgcccaagctggtctcaaatacttgagcacgagtgattctgttaccctggcttcccaaagtgccgggattacaggtatgagccaccatgcctggcccagttacttgctttttaaatagctcaaaagtttttcatccttttaaccaaagttgccaaatctaaagcattattccttttggtcatcaagtagaggaatggatgaatatatttcagtttgcttattactaaaatatgttagtaatagcatattttattcaaatcactgcatattagctctgtcttattttccattttcatgacaaacacacccaaagctcagctcactgtatttactttcttttcatgatactgtttgctaagttttttctgtttgcttcaccatattttgaacaat[137 bp omitted]agaccatcctggctaacacggtgaaacctcgtctctactaaaaaaaatacaaaaaattagccgggcatggtggcaggtgcctatagtcccagctactcggaggctgaggcaggagaatggcgtgaaccctggaggcggagcttgcggtgagccgagatggtgccactgcactccagcctgggcaacagagcaagactgtgtctcaagaaaaaaaaaaaatagtttgtgttttcaattgtcttatttagacaaactctgtagtttcaaagttatctttttcttgcctgatgcctttgatgtttgatgatgttaataatatactattttcaaagccaatttcttatttctacactgatattggaaaaagaataaagtgatgaagtcaacaggtgttattaaaaaatgtgaataacaggaaaatgttttgttgtttgttttgttttgtctttgaagtctttcacagactagatttgaaggtttatgaaggatagggcaaaattttctaaggaaagttgcatcctatgacctcaggctgacttcaagtaagagtggatttgataaaggcattgtctttcttagagtatgtgcatcttggcagaggagcctggagaggcagtatagaaggattgttttagatgttggatctctgtaacctgcatttacattttgttgagccgttgtcatttgggggaaaacacgaaaaagaaaagatcattatcatgctactataatgcacatcacatagaattgcaatgatttgttggttgttcattccagtccaagaactgtgagtttctccagccaaaggtcttgtatttattgatctttctgtcccacaggcctaaaacagcagttggcccatggacagtttaataaatgtttgctgactaatagatagggtatctaaaatcttttccatggccttatctctggagattaaaattttccagcacttgtctataaaagatgtctatgcgtaactgtagggaagacattgtaatttctgaagaggaggagcaaaccgacaaggttattgtagcattgattataatgcatggtagcagtctattctcagacctttagatgcctatttacctgatgcactggcaccaatgcccccattttggtgtgccatcttcccttcaccacttgggacaacacagataataaaatcagctccaaaagctaacccatggtggatcccttcacaccagttcacggtagaaagtaacccccttgcttgtagaaaacattattattattattcttcagatggagttttgctttggtagcctaggctggagtgcaatggcgcgatctcggctcactgcaacctctgcctgatgggttcaaacgattctcctgcctcagccttccaagcagctgggattacaggcgcgcatcaccatgcccagcaaattttttgtatttttagtagagatagggtttcgctatgttggccaggctggtcttgaactcctgacctcaggtgatctgctcgcttcagcctcccaaagtcctgggattacaggcatgagccactgcacccggcctagaaaacatcattaaatagcaaacagtagcagtgtgcttggggattttaggattgattattttcaaatctctagaaaagctcaatgtattaccttaggctataatccctgggcagagtctcatctgttaatgggagctggtctaagggtccttccagctcccagattgatgatttcccaggttgatctgctccctgccacccacccatcctcggttttgtttgtttttacagagataatgtctcactatgttgcccaggctggtcttgaactcctggcctcaagtgatcctcctgccttggcctcccaaagtgctggagttcctgatgtaagccactgtgctcagcccatccttggctgttaaagtgtggaggtaaacagtagatgccaagttttcctccaggttagaagtggcagatgccccagtacagaataatgtccctaaccaggcctcccactgcatgaagaccttattttctggagcttaaacctggacaaaggtctgaccagtagcactatgttcatgaatatcaggtcaaaaatttaaaactgggactatccagaggaacctggtagctgcaagtgtagtctgcagtccaatggtcagctatgaaaacaggctacttgtactttctgtttgtcatggagtctgatgtaaaaattgatgacactttctaacttctggtgtgcttcccttccttgttcattttccataagtagcttcctccatccctcttcccaacaggccacagtcaattcaggacattttaaccatgaaaatgagtctctgtaagaggaatttagaggccaggcacggtggcccagcacttcaggaggttgaggccagcagatcacctgaggtcaggagttctagaccagactgaccaacatggtgaaaccctgtctctactaaacatacaaaattagccaggcatggtggcgggggtctgtagtcccagctacttggaaggctgaggcaggagaatcacttgaacccgggaggcggaggttgcagtgagctgagattatgcctgggcaagaaaagcaaaactccgtctcaaaaaaaaaaaaaaaaataaggaatttaaaaattaacatagaggaaggaataaaggggccagccccttaaaaatcccccaaacctctttaacaggagtttaggttataatataaatgtgttgagggtactttttgcctttgttgatgaaggactctagtgagattgtgctgatgatattgctgtacttggaatggactggtcctttcatttcctggatttgtctctttgttcttttgagttcaggcataacttatgttaatacactttgcagatactgtgtttttgacaaattgaaggttttggcaaccatgcgtggagcgtccatctgtgccacgtttctatcatcatgtggtcagttggtgactctgtcacattttgctaattcttacaatacttcaaattttccattattattactctgttatggtgatgtgtgataggtggtctttgaggtaactgttgtaactattttgggaggtcatgaaccaggaccctatatgatggcaaaattaattgataaacattgtatgtgttctgactgctcccctgcccagctatttctccatctttctctcctttgccctccttactccttgagactcaacaatattaaaattatttcaatgaataatcctccaatgccctcttagtgtgcaaattaaaggaagacacatgtctttcactttcagtcaaaaccaagaaacgattaggcttaatgaggaaggccatgttgaaaactgagacaggctgaaagctatacttcttgtgccaaagttagccaagttgtaagtgcaaagaaaaagttctcaaaggaaattagaagtgctactctggtgaaaacattcatgataagaaaacaaagccctaattactatggatattgcctagggtagtactccacgccctctgggcacacaatagatattatctgatgaactggaaaagagcaaaccagaagtggctttattttcccacttggactcccttggactgccttggactaatttttaagtcttggttggaaatcaccgagtaggttcataaggtgcatgacagaaataagctttatagtggcttactttcatttagttctggaagtttacctttgccttagttttggaagtaaattctagtttgtagaaccatttttgttgctctttcttcagtcttgatattccattctcttctgtccttcctaatggaatttatgcattcttttacaacaggtctgttggttataaattcccagagttttccttcatctgagaatgtctattttatgttccttcctgaaagatatttttactggctatagaattctgggttgaaagttcttttctttcagcacttttctcctacacagaaaaatgcactactcccttctggccttcatggtttctaactaggaatccaccagcattagaatcattgttatggtaaagtgatggttctcaactgcgaacatttccacacccaaacaagcatttggcaatgtctagagacattttgtgcttgtcacaactggaaattgctactggcatctagtgagaagaggctaggggtgctgctaaacatcctacaacgtacagcaaagcccaccagagcagagaattatttgacacaaaatgtcactagttccgaagctgagaaatagttacatatgtgtcatttctcactgagtgctctcaagagttttgtctttaattctctgaaatttggatttgatattctagacatggatttcattgcatttattctatttgggtttcattcatcttcttgaatgtgtaggtttacatcttttgccaaagttgggtagttttaaggccttctttcttcaaatatatttttagctctgctccttttctgtttctgggactctgatatgaatgtttgatcttttgttattatccctatggcccatgggcttccattctttttttcccccaattgattttatttcttgtctagaatggataatttctattgatgaatgttcaagtttattatttcctctgccatctccattctgttattgagccaatccagtaatttttaaaaatttacttgttgaatttttcatttccatttttttctatttggttctttgttatatcttctatttctttacttagtgccccctcctttaatttgatttaagagtgtttgcaattgcttggtgcattttaatgataggtctcttaaactcattgtcagtgaattattaatggcaaaaactgaaattacttttgcaccaaccaaatacagtatcagtgtaatcttggtgttggtatctgttctctttttctattaggtttagatttgcctggttttggtataatgaatatttttaattgtatccttgatattttgagtattaggttatgaggcccaggtttctattcattttgtgtttaactttttaagaaactgccacactgtttcccaaagtaattgtaccattttaatttccaccagcagtatgagcttcacctgcttcttatcttcactaacacttgctatacttagctttttaagtgctagccattatattaggcacatagtgttaacttattgtgttttaatttgcatttcacttgtgactaatcatatgtttatttgacatctgtatatcttctttgggttgttgaattttaaggtctttttatattcaagtctttgtcagatatatataagattagaaaatattttctcccagtctgtggctaatcttttccttctcttcacaaagtcggttaagagcaaaagctttcaattttgatgactaattaatttatttgttaaggacttgcagtttcagtaacatatataagaaatttttgcctactccaaggttctgaaagttttatagttttaagcatatgatacatttttagttaactttttttttttaagacagaatctcactctgtcacccaggctggagtgcagtggcgcgacctctgctcactgcaacctctgccttccaggttcaagagattctcctgcctcggcctcccaagtagcggggactacaagcttgcaccaccatgtccagctaatttttctttttttgtattttcagtagagatgaagtttcaccatgttggccaggctggtcacaaaccagccagcctcagctgatctgccagcctcagccccccaaaatgctggaattacaggtgtgtaccaccattcccagcatttagttaacgttttttgtaggtgctttgagctataaatcaatgtaaatttttaaacatatatataacaagttcttctagcattgtttgttaaaaagattacctcttctttaataaatttcctttgcaccactgtcacaaatcagttgtccatgtatgtgtgtttctcaactctctattttattccatgaataccacacagtcttgattactgtagctttataataagtcttaaattcaggtaacatatgttctccaactttttctttttttttttttgagtcggagtctccctctgtcatccagactagagtgcaatggcgtgatctcggctcacttcaacctccgactcccaggttcaagcaattctccctgcctcagcttcccaagtagctggaatttcaggtgcctgccagcagacctggctatttttgtattttttagtagagatgggttttgccatgttggctggtcttgaactcctgacctcaggtgatctgtccaccgcagcctaccaaagtgctgggattacaggcatgagccatcgcgcccagcctattttccaactttcagaattatttttaaaagttgttttcactaatctaggtcctttgcatgtccatatgtattttagaattgagttcccaatttctacaaaacaaaaagcctcctgaatattcaaaatgggatttcactgaatctataggtcaggttggaaagaattgacatattaatggtattgagtcttgtagtctctgaacatagtatatctctatttaggtcttttttaaagttctcccagaagtgtttttaatttttatactatacatcttgcacttcttttgccagatgcatcactatgtatttcatattgtttatggtgttataaatggcatttaaggttttaaggttcagattgttcatggctagttcatgcaaaatcatctgctttatatatattgatctttattttgcagtctcactaagctcatttagttctaatagtgttgtagataccttcagattttttttatatagacaatcatataatctgttaataaagatgattttacttcctttccaatctggatactttgtattctttcatttattgcactagctagaacttccagtataatgcttagtggaagtgtttagaccaggtatcctctttttgctgatctttggacttttaccattaagtatgatgttagcagtaggtttctcacacatactctttattggttaaggaaattcccagaatcccagaattcttttcctccttaactgaattattctccttaatgaatgctggatgcctagtaaattttttattttattttattttttaatttttatttatttttttgaactggagtctcgctctgtcgcccaggctggagtgcagtggtgcgatctcagctcactgcaacctctgtctcccgggttcaagtgattctcctgcctcagcctcctgagtagctgggattacagacctggcgggtttttttttttggtatttttagtagagacggggtttcaccatgttgatcaggctggtctcgaactcctgacctcaggtgatccacccgcctcagcctcccgaagtgctggaattacaggctcgagccaccgcacccagctgatgcctagtaattttttattttccactttggctactgggaaaaggaattattcctggacgtttttgagctctgtggattcttccctctaatcctttaaggtaattgtttttccctggcttcaggtagttttcacacacgcacgtgttgatgaatatttagctgaacttaaaggaagatcctctggagatttccgtgcagttctctcctcttcagtgttttgccttgtcaactcgggccactttggcctcatcagactcctcattctatctaaacactaggagaccaccaggctctgcctgagttactcctcccagcagtaatctggaaaaactaggaaaaatttatttctgtttttttcagggatcactgttcttcattggaaattgacattttagtatattcaatgtcttaaaaaccattgtttcacctatttcgtttagctttttagtatttacagatataagggtaaatctggtctgtttctccatttgatcagaagcagacatctgttcattctgttactggtgactttcagttaacagaataataaaattaatatgaatatgccacacttttctagttaaaatgttttgtctaggaaatattctttactgtgaggttataaaatgattctcagataaaaacaaggtaaaatcaaaggtgactactttccaaccttgctctctcccacctatagtttgtattttaatttttcttaagagacaggggttttgctatgttgcccaggttggacttgaactcctatgctcgagggatcctcctaccatgtcctcccaagtagctgggattacaggcgtgcaccaccacaccctgctcccacctattatttcatcattttgattaggtcttgg[135 bp omitted]gaaaccccatctctactaaaaatacaaaaactagctgggcatggtggcgcatgcctgtagtcccagcctctcgggaggctgaggcaggagaatctcttgaacccgggaggcggaggttgcagtgagccaagattgtgcaagcgcactccagcctggcaacagagtgaaactccatctcagtgtacttgtcaccttaaaaaagatctagtcaacatgaatgaaaatggcttattacaatacagttacataacaaaaaattatttttcacacaaattgtgaaattccatagatgacaataatttaggagggaactacctgttaaaggtgtgacttacaaaatgtgctaaatatgtgtacatatagtcaccatttcttaactcatgtaacactaaaagataccaagaacttcacttagaagaaattgataaagtaacttttcatcattcagaattacccatccaggctggtcacggtggctcacacctgtaatcctggcactttgggaggctgaggtgggcggatcacctgaggtcgggagctcgagaccagcctggccaacatggtgaaaccccatctctattgaaaatacaaaaattagccaggcatggtggagggtgcctgtaatcccaggtactcgggaggctgatgcaggagaatcatttgaacctggcaggcagagattgtaatgagccaagatcaccccactgcactccagcctgggcaactagagtgagactccacctcaaaaataaaaattatccatcctgctcagagcttaaacattataagcaaatatctactatattattctttgattaaatattgggttcatctatgtaagtttttttcatgtatcttcatgagtgaaatttttctggaatttgatgttcaagagctatcccatctacttttattataaaaatgttagtcttttagcatgccctggcaaattttccataggattttctattcttcagggtgtagcctgtacagttttctagtcttacatgtttgttttgttttgttttagacagggtcttgctccatcaccgactgcagtgcagtggggtgatcacagcttactgcagcctcaaactcctgggcccaagcagtcctctcacctcagcctcctgagtagctgggaccagaggcatgtgccaccacacctggctaatttattttttgcagagatgggggtctccctatgttgtccaggcaagtctggaactcctggttcaagtgatactcctgtctcaacctcccagagtgtttggattacaggcatgagccactgtgctcaacctcatcttacatgatacttttttctattttttgaactttttgggttgtttttgaaacttaatcatatttaataatgttttcctagaaaaaaaccgtacacatataaaaatcatgtctaacagagttcacatacttaatactaaaaaatatctccaaacatatagttatattccatttctccttataatatagtagaggcactgacaaagtctaatgaataatagttttcttcaaaggactagattttgatgaaaaacctgtatggttttttattccatgatttcagcttttcattaagcctttccattcattcatttggggtatttgttcttattctaccttgctgtgtaatcattatttaactcaataaatatttgaggccctacaacattataggcactgtcctaagtgctgtggatacagtgctgtggatacagtgatgaagagaaacaaactgccctcagtcttcttggttttatacacagagcaatttctattgataactgttttagttatttcacaggatttaaaatataggtctcattatcattctaaatactctgtaatttcactttttatttgctctttaatctaagaatggtttatatatagtagtaaatttcaaagaggtaagaatccatatggctatccatttgctagtttctgagttataactgtggtaaagaattatataacacttggctttagaaatttgttagagagaagttatttctgaatgtcttttaaaaaactgctgaacactcaacaaccccacttttactaaagtcataaggctttcttttataggtttttttgatgtagcatgtgaaattaatattcaaagctttcttcattgtattttactgattttttttcagaattaacattctgatgttcagtaagacataaatagagatgacatatttgtctataatcattatagtcttaaaagtcctcctctcataaaatggcttaataccaatacaaatgacagtcactaagtcatgtaaatctcaaatcattcaacccttataatctaatgaatacgattaaacagacatagatttaagatactttccaaaaaaaaaaaatagaggcaggatgtattgaaacaagacatgccaaataaattgtatgacatagttcaaggcttttctagattaattacatgatttttgtggaaatacaacagaattttgctaatgatgaaagatttccaaaatgaattatatataaattcttgtgggtttttgtttttgagatggagtcttgttctatcacccaggctggagtgcagtgatgtgatcttggctcactgcaacctccacctcccaggttcaaggaattctcatgcctcggcctcccgagtagctgggactacaggcgtgtgctaccacgcccggctaatttttgtatatttagtagagacagggtttcaccatgttggtcaggctggtctcgaacccctgacctcaggtgatccacccacctctgtttcccaaagtgctaggataacaggtgtgagccaccatgcttggccaaattatatataaattctttatgcaacatctctgatgagaatgttttgagaatgattcaaaaagaattcatgctatctcataaaattttaccctgatattctgcaattgataactgatcagtaatttctttcctatattgattgcatgatgaattctctgctgctgctgctgctgctgctgctggatgtgtgctctgttaaaatgccttccaatattacttacatttgtggtgttcctcaagagaaaaaaataaatgacatcaattaatgagtcatgaataaagcccttcctacacttttatataatatttcacaagagtgaaatgaagtgagagcttgaagaaaatgctttctcaaaatctttaaattcataggatttctcaaaagtgtaaatattctggtgttgagcaaagtttgactcatgactaaaggtgttcccatagtctgtccattcacagagatttgcactattatgaattttttgttcagtaaaatatgaatggtgactaaagatgtggctacttttcttgcatccataaggttctgcatcagtatgaattttcttatgtcgtgtaagctgtgaaccccagataaaagatttcccacattctttacatacgtaaggttcctcaccagtatgcattctctgatgtcgagtaagttgtgaaccccagagaaaggcttttccacattcttcacattcatatggcctctttccagtatgaattttctggtgtcgattaagttctgaaccacgaaaaaaggtctttccacattccttacattcatagtttctctcaccagtatgaattttctgatgtcgattaaactctgagccatgaagaaaggtctttccacattccttacattcataggatttcctctcattgtgaattttctcatgttgagcaagatacgaagcccaagtaaaagtcttcccgcattgcttacattcataaggtttcctgccagtatgaattcgctgatgtcgagcaaggtgtgagctccaaatataggctttcccacatttctcacatttataaggtttcctaccaacatgaacattctgatgttgagcaagatttgaaccacgaataaaggcttttccacattccttacactcatgagatttctcaccagtatgaattctctgatgctgagttaggtgtgatccacgagtaaaagctttcccacactccttacattcataaggtttttcaccagtgtgaattctctgatgtttaataagatgtgatcgctgactaaaggcctttctacattcattacattcatagggtttttcaccagtatgaattctctgatgtcgagtaagatctgagccacaactaaaggccttcccacattccttacattcataagatttctcaccagtatgaattcgcttatggacactaagttgtgaatgaaatctaaaggctttcccacaatccttacatttaaaaggtttctcaccggtatgaattctcttatgaccagtaagactcgaacgtaaactaaaagacttcccacattctttacattcatatgttttcttaacagtgtgaactgtctgatattgaataacttctgaatcaggaagaaaggtattcccacattctttatctccacagaatttctcacttgtgtgaattaactgatgttgagtatgatctgaaccagaaataaaggctttccccagttctttaaattcattcagtttgtctcctgtattaagtctctggtgtagattaaacactgtatgctggttaaaagtgggccttttttcacaggtgcgtatcacctgcttgaagcattcctcttgattatcttgaagtgtttgaaactgagtgttgccttcccagtcacctctaaaacataaacagtcaaggctgtggtttttacaaattctcattatttccaattgggctatttctctctcaaaaatgccattttttggtaataacttcttggtctgacacctcgactgcatgtctgaaaaataagaaggtaaaaacatcatacggttgtatgtacaaaaagcaatacaacttctaaaatagatatagaaaatcttgaagtaaagcatatgagaagtgaatggcttagaaaattctcaaatatgagcaatatgaaaaaaagggcaagaaataagtagaaatttaaaagaaataaaagttgagtcaagtgatgagaaatatgttttattttgatcatattcatctgaggagctcaataaaaaatgattatccaggtatcacctcaataacagaataataagtcataaaatacctacaagtttccaagtactatgatgaatgtcttatataattcagagcttaaaaataggaatgctgggaaatagcagaatatcagtctaatatgagggaagtaatctgatccagagttaccaaagtactaggatctcaatagcagggtatgctgcatttaggttaaaggagataattatgggtgatagttcagacagaaaaatagtttgaaggccaggtacagtgattcacacctttaatcccagcacttggaaaggctgaggcagatggattgcttgagcccagaagtttgagaccagcctaggcaacatggcaaaaacccatctctataaaaaattagccaggagtggtggtgcatgcctgtggtcctagctacctggaaggctgaggtggcagcatcacctgagcctaggagatgaggctgcagggagccatgatcacactaccacactccagcatgggtgacagagtgagaccctgtcttttttttttttttttttttaatactttgagttttagggtacatgtgcacaatgtgccagttagttacatatgtatacatgtgccatgctggtgtgctgcacccattaactcgtcatttagcattaggtgtatctcctaatgctatccctcccccctccccccactgaccctgtcttaacaacaacaaaaaaatagtttgagaaattttttcaagggagaaggagtctggcacaagctaagaataagtactcctctgtgactcttttttctaatgtatatatttaggatcgagtacaattgttatcagtttttcttgggagacagcaagtactctagcagtgactcaatgaattgaaaggcagtttagttacaaagtatgagcagtaatgtactgcaatggaaagatgacaaactgcagtttcagactctagttctgtttactaaaactactttttaggtgattggaaaattactgagcttgactgagctcttaatttttcatattataaaaaggaataaaacatcactttgcagaggtttgttgcaaggattgggaataatacgctatttctattaagtgcctgacacaggatacgtgttgaataatcagtagctgatgattattattagagaggaaaagctggagaatacggggaactagacaagtcagagtttgtctttttatttatttatttatttatttattttgagatggagtctcactctgtcgcccaggttggagtgcagtggcgcaatctcagctcactgcaacctccgcctcctgggttcaagcgattctcctgcctcagcctcccaagtagctgggattacaggcgcccacccccatgcccagctcatttttgtatttttagtagagatgggattttgccatgttgtccaggctggttttgaactcctgacctcaggtgatgattcacccgcctcggccttctaaaatgctgtgattacaggcatgagccaccgcgtctggctgggcttgtcttttatgacactgtgttcttctcgttgtacttcataagccctaacctttcttctgccacttcctcctcactgtgaccagaaactgttatcacctgttactctgattttcaactaagcagcctattaggtcttctcttaatgttccctgtatgcagaaatgtgtggccatgttccaatcacagaagagaacaaaaagtttcttaagagacaatatattcttgttaattcttttaaacctaaaataagaaaatccataaatgttggttaaaagaatgaactaataaggagaactaataaatgcaggcaatgtacaatcaaggagaagataggaaaaatgacaaaaattcaaaagggatgggtaaaataaaaaaatgaggttaaaaaaatttttttaactgaatgaagaattttacgaaaattaaattttaaaaaagggagatgagaaggaacttgatccaaatcatagataaaataagggccactggagaaaagaatggcacttacctttttgttacatgagtgaaaaatgagagcacaaaaatagagtggtatttggagtgaagagaaagttctttgagaaaaggttttgtctctatctaggcctcaggcccttattaaagtgttttttgtttgtttgtttgtttgttttgttttgtttttgagatggagtctgactgtactccagcccaggctagagtgcagtcatgcagtcttggctcactgcaacttctgcctccaaggttcaagcaattctcctgcctcagcctcccgagtagctgggactacaggtgtgtgtcaccacactggctagtttttgtatttttagtagagacgaggtttcaccatgttggccaggctggtctcgaactcctgacctcaggtggactgcctgcctcggcctcccaaagtgctgcaattacaggcgtgagccacggcacccagccagtttttgtttttgtttttgttttcccctgagacagagtctcactctgtcgaccagactgcagtgcagtggcacgatctcggctcactgcaacctctgcctccctggttcaacaattctcctgcctcagcctcccgagtaggtgggactacagctgcacgccgacatgcctggctaattttttgtatttttttgtttttgtttttgtttttgtttttttagtagaaatggggtttcaccatgttgcccaggctggtcttaaactcctgagctcaggcaacccaccaaagtgctaggattacaggcgggagccaccacacccggcccattttttggtcttaaggggatattccagaccaatatttcagaggtgttgctgcctcactgtgcagctgagctgttatccacaacaatggcctccttgtgcgtgttcagccctcactcacctgggcaaggtcctcttgtctcatccctcaaaatcttccagggctctttccctttctccaataaagagaacgcttctggctgataaatgcaaaaacctgcccagaagatgagaaacagcaaagaaccacattgtaaagattctaaaatttgcaactacttctttggttactaaggaagagaaacaattacaggcaggacaaaaataagtataaactatgggaaagatggaagtgcccactgatgataactattgccagatttacaaagcgcaaaccattttctaaaaaacaaaggtcagaagttaccctggacatttaaaagacaataaaaaaaatcacaatacagaaagcaggaatttctaaggaaaatgctgaatcttacccagtgagaccatgttgctgtagttctccaacatcacatctctatataaatccctctgttccaggtccaggcactcccactcctcctgagagaaatctacagccacatccctgaacatcatcaactgttggaaagaataattccaagtattaatggtgaaatttttaaaaataattataatccctatagatgaaaggggaaaggctggaaaggggcactgcagggagtggggcatatattgggcgaaaaactggagttggctgcctgtggtttcaggggaaatgacatgggaataagggtgacaaaagccaagtgtctacatgctctttttttttttttttttttttgagacaagagtctcgctctgtcgcccaggctggagtgcggtggtgcaatctctgatcactgcaagctccgcctcccgggttcacgccattctcctgcctcagcctcccaagtagctgggactacaggcgcccgctaccacgcccggcaaattttttgtattttttagtagagacggggtttctccgtgttagtcaggatggttttgatctcctgaccttgtgatccacccgcctcggcctcccaaagtgctgggattacaggtgtgagccacgacacccagcctacatgctccttttttttgttcttttacgagacagagtgttgctctgtcacccagaccggagtgcagtggtgcaatctcgactcactgcaacctctgcctcccaggttcaagtgattcttgtgccccagccaccctaacagctggggttacgtgtgtgcaccactgcgcctggctaattttttgtatttttagtagagacagggtttcgcaatgttggccaggctggtctcaaattcctgacctcaagtgatccacccaccttggcctcccaaagtcttaatgagccactgcacccggtaaaaactcctgttgctcagttaccacatctttatgatcttcaaatcacaaataccaaaacatcagaatggtagcccagaacagacatcataggagttttttgttgataccactgagaggctacaccagcctggaagaactagccccagatttattatgtgagaaaagttggaggttttgttagttgtaagcagtctttactgggcacaaacagacttgtgcatacagagcctttggcccaggtaactgtcctttgcttaagctactacttttagttgaattatctgttagtttaaactgagagaattctcaagagatacactccctggctgaatattattttctgtggaaaatgtgtagaatctccagactttgttaagcagctgacaatcagcaaattcagtgtcataagtgattactgtgaaagtcatcagatgagttttttgtcgataccactgagaggctataccagcctggaataactagccctggattgttaatgatattaacctttcattaatttcctggaaaatcccagatctctttgaactcaacctcccatcatatctgctaaggaaagcatcacaaagtgccacatacctaaatgaatcccaaccaacaccaactcccatcttgattaaatgaaacatcccattctacagagtaaataaaagcctttatgtagtatgtcccctttaattattctatcccctcttgttaagccacaggtttgaaatgaaaagtctttactgttccccttaaggaaatgtatttctcttcttcagtgctctgccagattgggacacaggagataactgaaagccctggtggatagatttggtcatactggttggagaaaagagggatatctagggaaagcattggactgtttcacagtcattacttatgacactcaatagtgattcaggtaagcagtttaaggataagcaataaaaatattcacatgatttgatataaatgggttatatttttggagagaggcaattccaactcacatgggccatgacttaacattccaagtccaccagtccttctctggattctttcttggtgaggcagcgtgctgggaaagcagagctagaaggaaagaatcacaaggtcaggcctttctcagagctctcaaagggacaaataggaaatgccattttcttccttggaggtaagtcagaaggaacctgaagaaatcctggccctatccaaaaccagagagattcaacaaaagcaggatgaagtttcagtcgaatcacttatgccaaaatcatgatctggatcaggatactactagataagtcaattctggcttgccctaaattcatacatacctacattaacatttatcctcaagccgcctatgaatgtcagttaattgtctcatttaaaacatctggaaatgggtcacttgctcaaattcactattaggaaatatcataggtttgctgaatgcaaagcttgttactttgaatactgtatcctaccctctggatttcagaatttcttattttattgagtgaaggatgagctgggcctttcccttataggagcagcccatgatctctgcctcctgtgttttcattgacagtgagcatcagggtggctttttcatgaagggaacccaaagatggaaggaaggctggattgggcgagtagtcagtgttgtgaagcacgaacttttattaaaaaaatatattggccgggcgtggtggctctcgcctgtaatcccagcactttgggaggcgaggcgggcagatcacgaggtcaggagatgaagaccatcttggccgacatggtgaaaccccgtctctactaaaaatacaaaaattagccaggcatggtggcgcatccctgtaatcccagctattcgggaggctgaggcaggagaatcgcttgaacccaggagttggaggttgcagtgagccgagattgcaccattgcactccagcctggcgacacagcgagactcggtctcaaaaaaaaaaaattatatatagataattttataattatctataattatatatataataaaaattatatatatatatgcctctctgaatctagctttgcacttagcacaagggaatcagataaataagttgcaagacctactatcaaggaattcacagtcagaaaagtaagcagcaattacaatactgtaggaaataaaggtaatcatggttatgaaaggagccaactagttctaaggagcccaaaccaaaactagtttttaacagaaaatttcctataggaaatggtacttcagctgactcttgaggggctgttctgtgtgggaaatgcgcgaggggagaagaaaagacacacaatacctttaagggtaaacaacctttatcccacataaatggcaatgcagatataataagcaaatgatataataagcaaattgcaatgggaagagaagggaaaatatatgtacatacatagatatatatgtgtgttgtgtgtgtatgtgtgtatatatgtgtgtgtgtgtatatatatacacatacacacacacacacacacacacacatatatatatatatatatatatatatatatatatatacacttaccaaactataagcattcaccaccagactgggaagcaacagcctgggctccagagtcagacactacacccagcagactatggaggattcaccaccagaccgggaagcaacagcctgggctccacagtcggccacccatccgtgcacaggcgaggagaggtctcatgaagctttggtgcagtctgggagcttagctctttttgtaacaagttgtttggcatgaggcccagtcacaagggcccttcctgactgggctcaaggaacacaaaaagttcaacctgtttttgcgattgtctattgtttttcaatgactaatgtataggaatagattgaaatagagaattctccgaaacagcactggatgaacgcttcaaggggctcacacaacctgttccaggacttggtgaccattgtttgtgtccatgttcaattgagttcaaatttaatatttaacttttcctccacaggggctcaccagagaagacagggcaaggtgagggggatctcctagcagaggaaacaacatgcgccaatcaagcaaagatatttttgtgcattcaaggaacacagagaggaaagacagtggcagatggagacgtataaagcagggatcctgttatgaaaagccctaaaaaatagggtatagagtttgggccatatttcagaggtaataagaaagcattctgcatttttaaagtaaggtttaaaaatgtttctaattagagatacagcaaagttggtgtgagaggataaagactgatatacataatctgaggagttcatgaaaattccatgtaaagcctgtagtatgaattggtcctaggagacagacagcttcaggggcatagagaactttaagcacttttccaagaagagtgaagggctggagaataaattgtgaactaaaatatattttgtgtttgagaacatgaagtacttgagagtgattattacacggtt[136 bp omitted]catggacaaacctcgtcttaattaaaaatataaaattagccgggcatggtggcacatgcctgtaatcccagctactcaggaggctgaggcaggagaactgcttgaacctgggaggcggaggttgcggtgagctgagatcgtgccattgcactccagcctgggcaacaagagcaaaaccccttctcaaaaaaaaaaaaaaggaaaaaaaaatttttagggacagtgtctcaaactgtcagtcatgctggagtagagtggtgcaatcacagtttactgttgcctcaaactgctaggctgaagcgatccttccacctcagtctgctgaatagggtgggactacaggaatgcaccactgtgcctggctaatttattttatttttgtcgagacggggtccgctatgttgcccaggctgttctcaaactcctggcctcaagaaatactttcccaccttggcctcccaaagtgctggaattacaggtgtaggccaccatgtccagccaaaaactaattctaatcctgatattcctcctcctggaaaccatgtagacagaaacaagaaaatcaaagtaaatcccaaccatcaggaaacagaaaatgaacagattccaaattatttggagatgtgaaaagaaaatgaaagaacaatgtctgtggaagccacagtgatgctacaaagaaaaacaaatgaggaatatccattcccatggggagtagaccatatcctgaatgaaagtttctgtgagcaggaatgatgtcaaaaggaggtggtaaaaggaggcccgaagatgtcagggggattcaaggtggcaaaacacattggttgtattttttttttaaagctttattgaaatataattcacataccatacaattaagccatttacagtgaacaattcaatggttcttagtatattcacaaatacgtgcaaccacagtcaatgttagaatattttcatcatttcgaaaagaaactctaaccctttggctatcactccttggcttccccactgccacatgtgccccatacttagcctcaaataatgactaatctactttctgactctatggattttcctattctggactttcatatgaatggaataacatatgtggacttgttactggcttctttcacgtagcataaggttctcaaggtttatccaaattgtagcatgaatcagtacttcattccttgctatgcctgaataatatctctgcaaatgaatagaccaccttttgtctacccattcgtctattaatggacatttgggttgtttccaccttttgacaattactattatttttgagatgaagtttcgctcttgttgcccaggctggagtgcaatggcacgatctcgactcaccacaacctccacctctggggttcaagtgactctcctgcctcagcctcccgagtagctgggattacaggcatgtaccactatgcccagctaattttgtatttttagtagagacggggtttcttcatgttggtcaggctagtctcaaattcccgacctcaggtgatccgcccgcctcggcctcccaaagtgctgggattacaggcctgagctaccatgcccggctgacaattatttttaaaatgctgcaatgaacattcatgtaaaagtttttgtttgaatatcatctattttgtagttttcagagtataagttttattttctatatagaaaatcatgccatctgcaaatagagatgctcttagctgtgttccgttcttttctccagtgtcttttatttcttttacttccccatttgccctagcccaattgccagtacaatgttaaacagaagtggggatccttgtctggtccctgatcttagagggaagacatccagtcttttaccattaagtgtgatgttggctgtgggtttttcctagatatcaggttgaattcctctttattcctagtttgtagaatgtgtatgttttaaaaaaaatcataaagggtattggctctggtcaaatgccttatctctatctattgagatgattgtgtgatttttgtttttttattctattgatatgatgtatcacattaactgacttttgatggtgagccaaccttgcatttctgggataaatcccactcagtcatgttatataattcattttagatgttactggatttggtttgctactacttgttgaggatttttacacccatattcttatgagatatactttgtctcgtttcagtatctgggaaatactggcctcataaaatgagctggggacttggctgtattccttaattatagtagaagacactgggtgaactcagagctgataataggagtcctcctgaaccagttgagcttctgaatggtaaagaaggcctggctattcaaagggaaccaaattttaaaaaaattgtcttctactggggtaacagaggaagaaacccttgagcaaaaaaaccttaaaaactacccttgccccattcacttttttcacatgaaaataccagtgacagctattccaggaaaatctattacatcctctccaaaatataaa[136 bp omitted]tggtgaaaccctgtctctactaaaaatacaaaaaattagccaggtgtggtggcatgtgcctgtagtgccagctacttgggaggctgaggcaggagaatcacttgaacctgggaggcagaggttccagtgagccaagatcacgccactgcacttcagcctagcaacagagcaagactccatctcaaaacaacaacaacaacaacaacaaaaaacacacaaagttttaaaagtgtgtcaaaatcccccatgtacaaaaaaactcactaaaaaaatcagagaagatgaaaatcatcacccaacatttcagtctgaattaaaaaaaaagtatgatgcaattgcagctctaaaagcagaccacaagcaaaaatatacgatctcaggagagagaagaaagtaatagatagaccatagatgggagttagtggaattcaagactgaaagagaaaataggctaagtcacatcagaaatgaagaataaactagctagtgcagcggcatgtgcctgtggtcccagctacttgggagactgagtctagaagattgcttgagtccaggagttcaaggttgaggccagcctgggcaacacagtgagacccccatctctaggcgcataagatctgacaaatgccacagaaagtatagtatggaacacagaatacagaaattaatgaacagaacaaaatttaacaaagaaacaaaaatcatttgaagaaatgaaaatgaaaagagagatccaatatgcaaaacgcagagcacctaaaaatgaaatccaaattaagaggatatatctaaaacgatggttgtagctgtgtatctaacactacagttttaatactcaagatgaatttcctgaaatagagtataaataaacgtgatgaaaagtgaaaccatattacaggtgaaaatgaaccaaaatagtagcaaaacatgacctaataaaattagactaaaactcatggggaatcaagataaaaatatcaaatataagaaaaaggaaattcaattgtcatcagacttctgcagtgctaaattcagtaccccaaacagtggggtaaatcttccaatatacttgtgaaaaaaacaaatgagggagtcaaaacatttttatatccagccaagctgtcattcgagtataaaggatataaggagttttatgatgcaacttaggaaatactgttgacatgcgctgtttcagaagaagctactagaagacatactccagccacaaaagaacaatagtgaaagtttcagcaaaagaatagtagtgatgctgaacatatttaaatgcaaatctaaataaaatagtaaaagcggaattatggtagccagcatcctggatggccccaaaggtacccagtatgtggtattcacaacactgtgtagctgcctcctatactgaataggattaacttgtatagcaataaggtactgcggaaatgatagagtatgagatagatataaaagacactgtggcttccagcttatgcgttcttgctgtccttttgctctggagaaaaccagttgacgtatcacagggacacttaagaaaccccatggagaggtctacatggtgagaaactgaagtctattgccaatagccatgtgagagccacgttggaaggtgatcctctagtccctgttatgccttcaaatgatagcagccctggccaagagtgtgactgcaacctcaagagaccccaagccagaacttcccagctaagccactcctgaactcctggtccacagaaaatggtgttaagataataaatatttatttctgttttagggtaatatgttttacagcaatagataactaatatagaaatgaaggttagagaatagaaaatagactagctcattgattgcctcatttgtgataactgagagataaagggtgtcatttcaagctgaaaatcaaggggaagaaatttagaaatgtttaggactacagccaaggcaggaggactgccttgaggccaggagtttgaggccagattaagcaaaagaatgagaccttctctaaaaaaaaaaaaaaaatgaatacaaatgtaagtcaaacagggcaaaatgtcaattaaatttcaacatacaagcaaaaagtaggaaatttaaaatgacagcacttagcaggaaaaattcaaattcctataaataaatctaacaatatatgtaacatacaatatcttttgtttgttggtttgtttttgagacagagtctcgctctgtcacccaggctggagtgcagtggcacaatctcggctcactgcaacttccgcctcccgggttcaagtaattctcctgtctcagactcccgagtagctgggactacaggcaccagccatcatgcccagctaatttttgtatttttagtagagacagagtttcaccatattggtcaggctggtctcgaactcctgacctcaggtgatccacctgcctcagcctcccaaagtgctgggaatacaggcatgagccaccgcacctggcctgtacaatgtctttatattaattactacaaatagttaaagaagacctaaacaaatgaaataatttatcacattcatgggatgaaaggctgataattttcaaggtgtcagtttccccaatatagtggtataggaagcttaaaagtaaaaggatagcaaaagatataccatgcaaatcataatcaaaataatgcttaggtggctataatatcaagacaccatagatttcagagcaaataaataacatggaagaaaggatggtcttgaatacatggtgccaggtcaactgaatttatatgaggaaaacaaatcatgatttcccctcacgacacaaaaatcaattccaggtttatatacctacatgtgacagataaatatagatgaaaatacagaatatcttcataccttggggataagcaaagatttgaataagatacagagtacaaaccataaaagaaaaatgataatgatcagactacattttaaaaagcaatttttgttcatcagaaaagagtgaatgggctggtcatggtggcttatgcctgtaattccagcactttggaaggctgaggcgggtggatcatctgaggtcaggagttcgagaccagcctgaccaacatggagaaaccttgtctcttactaaaaatacaaaattagccagacatggtggcgcatgcctgtaatcccagctactcaggaggctgaggcatgataatcacttgaaccggggaggcagagcttgcggtgagccgagatcgcaccattgcattccagcctgggcaacaagagcgaaactccatctcaaaaaaaaaaaaaaaaaaaaaaaagacagtgagtaaaaatgcaaaccttacgctaggagacgatatatacaatacacaaagctgacaagggactcattcagattatacaaagaactcttaaggattaacaatgaaagacaagtttcccaacagctaggctaagaacttgaactggcacttcccaaaggaagatatccaaatggacaatgcacattaaaacaaaggtattcaagttccttagtcatcagttaggaaaaccacaatgcaataccactacatatccaccatattggcaaacattttacagtctgacaatgccatgtgttaacaagaagatggatcaattggaacttgcataaactgttgatgggaacttttaactggttcagccattttggaaaactgacagtatctgcttgaggagattcacatactcttactcaccaattcctctccttggaataacccaatagaaatgcatacatgtaaacacaaaatgacaagtgcaagaatgctctcttcctgattattcatgagaataacgtattgtctgtatatatgataaacttcaataaaaagactaggaagaaatacagcatattacaaggcaaatacaaacaaaaaaataagcagaggccatgatcttgagcatgctaaagcctgcaattcataataaacatataacaatcattaatatctgtatatcaaagcaacaacaactttcataaagcaaaagttacaggttatataaaataaaattttggctgtgcacggtggctcacacctgtaatcccagcactttgggaggccaaggtgggcagatcacaaggtcaggagttcaagaccagcctggccaatgtggtgaaaccacgtgtctactaaaaatacaaaaaaaattagccgggcatgttggcgcatgcctgtagtcccagctactcaggagcctgaggcaggagaattgcttgaaccagaagttgcggtaagccgagatcccaccactgcactccagcctgggcgacagagggagaccccgtctcaaaaaaaataaaataaaataaaataaaatttcattaatacacctctctcaatccaagacaaatcaagtgtaaggcaaaaagtaagtatagactgaccagatgttagatcacaaataaaagttcactaagttccaaagtttaaaaataacacaatatagcaaaactgtaaattatattattggtgaagtggggacctatgtactttactggaagtcttcaacataatcaacagaggttgaggtccccttatgtcacagggatcaagactcctccacaacactgaggccaagacactacaccactgtattagttttctactgccatgaggtagtggcttaaaataatacaaatctattatcatatagttcagtagaagtctgagttgggtcttactaggctaaaatcaaggtgttggtagggctgtgttcctttctggaagctccaggggagaattcgttttcttatgttttccagcttctagaggccaccaacattccttggcttaaggcccacttcctctatctagtaagcaatgtggcatctctctgaccattcttctgcggtcacatctccctctgactttaaactcagccaggaaaggttcactgactttaaggacccatgtcattatattagtccaacaagataatcgcccccatttcaaggttcttaactttatcccctttgcaaagtcctttttgccatataaagtagcatcgtcctagtttccagggattaggaagtaaacattggttgcagggccatcattctgcctaccttgaccccccttctatcttaagcttccttctttctgagagatactcagtgaaggaaataatgtatacagtggtccatttccaagacaaaatgccttgaattggcttaggtaagcaaactacagaagaaacaggatatactaggcccctgcttggatagatgatgcctgcttgtcagcctcccgctttctccctttcccccacttagttgccttcacccaaaccaaagaagtttagtctaagatgaaagtttgctagcctgcaaaatagctcattttgtctgcttttatcagcctgcccagctgcttaggtcataagtcaactattgaagagaccttgagctaactaggattgcagtgcattgtgggccgcaaccaaatgcagcaagacaagcctaaaaaaaaaacacacacacacaccggctgggcgcggtggctcacgcctgtaatcccagcagtttggaaggccgaggcgggcggatcacaaagtcaagagatcgagaccatcctggccgacacggtgaaaccccatctctactaaaaatagaaaagttagctgggcgtggtggcacgcacctgtagtcccagctactcgggaggctgaggcaggagaatccacttgaacctgggaggcggaggttgcagtgagccgtgattgcaccactgcactccagcctggtgacagaacaagactctgtctcacaaaaatcaaaaaacaaaacacctgaagcccctacccaacaatcaataggcaacatccgggaagattgtgaccccatagttatcagcctatgaggaaccaggggaggaacctgtgcactaggggataaattgcttgttgaaactgttgggtgtgcctatcagacactgatcttgcaagaccatcattaaaagtctcacttttgctgttctccgggtctctgagtccattctttgggacgggtaagtttgtttctcacactcaagaaatcatctttcactatcccacgctatctctccaaaactgacttgaatccaaccagaataaatgtcaatccaaccttgtatttatatttatctactataagaagtcccagaatttctagtcaactgtcttttcggacattgtataccatcaagtctcatttgtccccttttctcattcttcccaactttcaacacttttcctgtatgccttcataatggaattcataattcattaacaaccaactcctcttttatcttcaaccacttccttgaacacgccctaacattctgagtctaacagaaactaggctgtatctggaggactctgcagccctctcaacatttccccagctacagcctcttaccagtgggtctgaaaatggaacagatggccggcctccttgttgttcactaccttcagacctttcttcctccctccacaaactctagttttgaatttcctgccatgagattgtatataactcaccacatctcacttttgttgacctctaccaaacacagggtattttccccctatatctgaaatcttcagctcatggtttactctctgcagcgcgattacccttttctattttttttaattcttgcatttttaactacacccacacagatgagccttgtttacttacccttgcctggacttttcccccctctcgtggctcatttccaacaacatgttgatgggtggttgttccccagccgtcttccccagccctctaccccaacctgctgctccatttctctgctctaatttacggagaaactcttgaactatgttgtctacactgtgtcccattcttctcccctccttctaggttgcccccactccaatccagctacgggccagcacaaaaactgctccccacacattcacgaaggactatgcctgtcactcaacgcaaagctcaattctttgtttttggccccatagcggctgctatcaccacctttacgaacgtggtcacgcacaacgcgacgcagtcataatcacgtacatacagtcacatttaaatagtccattagggtcacacacagcgcctgtcaacgtcgtgtgcgcgtgcgcgcacacacacacacacacacacatacacacacacacacacaagctcccgtcgcggccccagctcctgcatcaatttcactctcgcatccactgctcccatcgcgatcgctcgcccccacgctccctcgccggcaaagccaccaactccaaagacattagcacctcactcccctcagccccggcctcgggccctccggagtcattcggcttctgtgtctcggaatcactcacccggccctgcggtcccttgatggtggaaggttccgcgatctttctattaaccctaaagggacagagggctgacaggaagttgcccggggaacggtgcactctgggaaatgtagtccggagcctgggccgtctttaactgccccggacaccgcggtcaccattaacggaccctgcatttgagccccatcccctcgctgggcaaagaccatcgcccacacaccgctcacatctgctgccgagagcttccagaattccaggccgcgtttaggaagcttcagcggaggcatgcaggctgccctacctctgcaaaaggctcccagccctgggaacaggacagtaagcccaggccatcttaggctggaagtaaccttggtcccgacggccctgggaaatgtagtccagagcctggaacactgcagaaatgccccggggggatggtgcgatggttttcagtaggagctcgctgcgtgggcctctgacctatgtggcatggcgggaaagtcctacaagactgtgccaagcgagtggcgagtctgtcccgtctctgcccgagcctcggcccggctgggtggacacctcttgtcccacaagtaccagcctgggatagaacgaaggggaaacgatccatgggacacagctacatgcccagccctataggggtaccctgtctgggaatccatgagaactcttcctaataccttattcccatcctccaatcgcccttaaagtgtttggtttcaattaatgtttatagtaacattagtactgttttgtaaattccattcatgccattctttttgctgaagtacacacttgccagttttcatttgcttctcttttagatgtacatcatttcaatctacatctaaactttctgacagaggagtaatttttttcagtactttcaaacttatcaggtaactaaaatagttgtttctttttttattgtgaaacagaaaatacttgaagtgcataaaatgtgtaagttcagtataactccacacaagtgttggtatctcaagaacaaatgcccattctatgtgatcatttctctttttgtttgtttgtttgttgttttttttgagacagggtctggctttgtcacccaggctggagtacagtggcacgatctaggctctctgcaacctctgcctccctggctcaagtgatcctcccacctcagcctccagaatagctgggactacaggtgtgtgccatcacactcagctaatttttatagagacagggtctcgccatgttggccaggctggtctcgaactcctgggctcaagtgatcctcccaagtaggcctcacaaagtactggcattacaggcatgagtcactgcacataacctgtgtgatcatttctgatacccagctccagctccagctgatct[147 bp omitted]gtaaaaccctgtctctactaataatacaaaaattagctaggtgtggtggtgcatgcctgtaatcccagctactctggaggctgaggcaggagaatcgcttgaacccaggaggcagaggttgcagtgaaccaagatcacaccactgcactccagtctgggcgacaagagcgaaactccatctcaaaaaaagaaaaaaaagttttaatcttgctgtgaaatgtatataaatgcaatcaaattgtacaaattttctgtcttgattagttgttaaactcctaactggattaaccgaaaaccccatagtaaaggccttacagaaggaaaggtatgcccatccagccatcaacatcattttcctggtactactggcaggggaccccaagaccaaccactacacgcccaagctctgatgattcactgggaggctcacagtgaagtgatacaaaagaaaatcagtaaagaaaaaagcgcatggggcaaagtccaggggaaaccaggtgcacactgcgaagggttctttcccagtaaatttatatgggatttatttgttccccagcagtgagttgtgacaatacatgtgagatgttaccaatcagggcagtttattatagattcagtgccctatgtttttattgggggctggtcacataggcagtctgtgcctaacacataccagaatttcaaattcccagaaggaaagcgggtgtttaacataaaccatactgtttgtacaaaaagtttaggcatagtaagccacttattaggaaggtgggaaccaatctgaaattcaagttctagatgcaagccaaagactaacctcgcatatcaggcctttctaaggataagtagtctcagacctgctatgttaactaatttctgctcactactgtcctaaagatgtatggttttcagcaacatcaaattacaagacacatgaaaaggcaagaaaaatcatgacactcaagacataaaagcaaaaagcaacaacaaacaaatagaggtagactcaggtaggatctccccaggagcttgaggctgcagtgaactgtgattgcaccactgcactctagcctgggcaacaaagcaagaccctacctcaaaaattaaaagaaaagaaaaagatatgatgtagatgttggaactatctaaaaaggaatttaaaatattattaatattttcaaagctttaccataatgtttttcaaccagaggtgattttgttctccaggagatatacagcacagtatgaagttcttggtagtcacaactggagaggtacaatttgcatttagaggacagaggtcagggaagctgctaaatacactacaagcacaggatagcttgccacaacaaagaattatccagtcccaaataatggtccaaggttgagatgccctaagtaatcaagacagtgtgtttttggtgaaggacagaaagatagattaatggaaggaacaggctgggcacggtgggtcatgcctgtaatcccagcactgtgggaggccaaggcaggtggatcgcatgaggtcaggagtttgagaccagcctggccaatgtggtgaaaccccatctctactaaaaatacaaaaattagctgggtatggtggctcgtgcctgtaatcccagctactcaggaggctgagacatgagaacctcttcaacctggggaatggaggttgcagtgagctgagatgacaccactgcactccagcctgggcaacagagcaagactccatctcaaaaaatatatatatatatttttaggccaaggcaggcggatcacctaagatcaggagttcaagaccagcctgtccaacatggcgaaatcccatctctactaaaaaatacaaaaattagctggatgtggtaaggcagggagaattgcttgaacccaggaagtggaagttgcagtgagccgagatcacaccactgcactgcagcctggaggacatagcaagactccatctcggggtggggggtggggggaggggagaagttattattatttttttttgtagagacaaggtttcactatgttgccctggctggtctcaaactcctggcctgaagcgcccctcccgcctctgcctcccaaagtgcttggattacaggcatgaaccaccactcctagcctataaaacttttttaggaacacataaaagaaagtgtacatgacctgcagttagatgaagggttcttagacatgacaacaaaagcacaatccataaaagaacaacttgatatactggacttcatagaaaatgtaaacgtctgctattgaagtaacaccgttaaggagaaagacatgggatagattgggagaaaatatttgtaaatcatatatcaggcagaggacttgtatccagaatatatagagaaccttcaaaactcaacaagtaaacaaataacctcaagcttaaaatgtgcaaagggcataaacggaaataaaaagatagataccaggaaaaaatattataaaatgtgcctatatgagatttataaatcactaatttccaccatatataaagtgctcatacatttcaataaaagtgaataatatttctagaatttaaaaaattagtattatagtgagacagacaaaggaaacatagttcatggaaataataagttttaaatatttaaaaaggtattcaccttcatatccaatgaaacaaagttaataatatagtcagaatgaaactataaaagtcactttagggatacaatggagtggcttgcagcaaaccagtattcctgcagaaaactaaaaaatcagatataatacaaaaaaaaaaaacacaaagctttttaac[131 bp omitted]gacaccctgtctctactaaaaatacaaaaaattagctgggcgtagtggcggatgcctgtaatcccagctactcaggaggctgaggcaggagaatcgcttgaacccaggaggtggaggttgcagtgagccaagatcgcaccaccacactccagccctggcaacagtgagactccatctcaaaaaaaaaaaaaaaaaaaagacatgaaggagtgtttgggacaaccaggaatagcgtagtcaagactatagattgtaggtaatcacagacattgtgcagccacatttttcctggattatttgccaattcttggcaaagggcagaaggatccagactgctaggactttagttttctgggcctaaaaacacaacattggagactttatgggccaagatccctgtgagaaaagagggacacagacttgaactctacataaggctggttttcttctcaagacagttacccatttctgaaactggttgggtcaggaggctcaggaacttaggcggaaagcttccaaaaagcagcagagtttttggtagtcttgctggattaagaagacaaagattttgagttcaggccctgtcaggggaaggtgccttggtgaacacaccagatcctcctgaaaccctgatgggctacgtcctaggagcaggcaaaccagaagcacaatgaacctccacaaccgtaatggagccctgactcaactcaatcactgattaaatgaaggtcatcagcccctacttgatctgcccagtaaaggaaaggatgaattctctaaaggaagatattatctgcagcctctactatttttatacaccagtccagaatttaattttaaaaagtattaagcatgccgagacaggactgtatgacagaaaactctgaaaaaacaaacaggtcggccaggcacagtggctcacacctgtaatcccagcactttgggaggccaaggtgggtggatcacctgaggttgggagttcgagaccagcctgacaaatatggagaaaccccgtctctactaaaaatacaaaattagccgggcatggtggcacatgtctgtaatcccagctgctcgggaggctgaggcaggagagttgcttgaacccagaggtggagggtgcagtgagccgagattgcaccattgcactccagccttggcaacaagagcgaaactccatctcaaaaaaaaaaaaaaattaaaaaaaaaaaaaaggccgggcagggtgactgattcctgtaatcccagcactttgggaatgcctgggtggattgcttgagcccaggagtttgagatcagcctgggcaatatggcaaaacctcacctctataaaaaaattagatgggtgtggtgatacatacctgtggtcccagctacttgtgaagctgaggtgggaggatcgtttgagcccaggagattgaggctgcagtgagctgaaaacacaccactgtgctccagcctgagcaataaagcaagaccctgtctcaaaaacaaaacaaaacaaaaaacaaaaaaaaaaaaacccaaaaagcccccaaactccaaacaacaaacaaacaagcaaacaatagaaatagaccaaaatgtgatcctggcattagagtaagtaggcaaggactttttaaaaagatgaaaagatgaaaaattacaccaaagaactagtgtacacattggtatgtataattgaagtcccaaaagaaaagtagagacagcgtggagaagaaccctatttgaagagacaatggcaaggaatttcccaaaaccgattaaacacagcaaccatagattcaagaagttcaccaaaactctgagaaaaaaaatatatataacctagaattctatagtcagtaaaaatctccttcaaaaaagaaaggataaaaagacatttcagacagacca[140 bp omitted]cggtgaaaccccgtctctactaaaaatacaaaaaattagccgggcgtagtggcgggcgcctgtagtcccagctacttgggaggctgaggcaggagaatggcgtgaacccgggaggcggagcttgcagtgagctgagatcccgccactgcactccagcctgggcgacagagcgagactccgtctcaaaaaaaaaaaaaaaaaaaaaaaaaaagaaatactaaatggagtttttcgagaagaacaagatctcagatgaaacagaaagaaatttaggccaggcacagtggctaatactagtaatcccagcaatctgggaggccaaggtggaggttcatttgcatctaggagttcaagaccagcctgagcaatatagcaagactttgcctctacaaaaaatcaaaaattagctgggcgtggtggcgcacacctgcggttccagctactcaggaggctgaggtaggaggatcacttgagcctgggaggtcgaggctgcagtgagccatgatcatgccactgcactcaacctgggtgacagagtccctgtttccaaaaaaaaaaaaaattagtagggaaagaatagcaatagaaagagtaagtatgtgaatataaatgaatattgactgcacaaagtaatatactgccctctggggttttgaatgtatgcagaattaaataacaaaaataaagcaaaaatgaggatggaggtaaatggagttaaagtgtcccaaggtcctctagcagtattggggaaatggtaaagtcaataatttgtcctagactaaaagaaagaggaatgctgtaatctttcaggtaatcactaaaagatttttaaaaacatgtacaacaaattgacagaaaaaatggatccacctttggctttgcagaaaatgacagtgcaatatgacagcacaaagatttataaagaacctagattctttttttttttttgaggggggtggtgggagacggagtttcactcttgttgcccaggctggagtgcaatggcatgatctcggctcactgcaacctctgcctcccgggttcaagcgattctcctgcctcagcctacccagtagctgggattacaggaatgcaccaccacacttggctaatttttgtatttttatcagagacggcgtttcaccatgttggccaggatgatctcgaactcctgacctcaggtgatacgcccatcttggcctcccaaagtgcttggattacaggcatgagccaccacacctggccccaatcttatctttatctggaatatgatatatttcatttacacattcattgtccacttccccaactagaatggtatactctgtgaggacaggaaatcttggctgttctgttcactgatattttcctagtgcctagaatagcacctggcacagataaggagctcaatgaggccaggcgcagtggctcacgcctgtagtcccagcactttgggaggacgatgcgggcagatcacaagatcacgaggtcaggagatcgagaccatcctggctaacacagtgaaaccctgtctctactaaaaatacaaaaattagccgggcatggtggcaggcgcctgcagtcccagctactcgggaggctgaggcagaagaattcttgaacccgggaagcggaggttgcagtgagccgagacagtgccactgcactccagcctgggcgacagagcgagactccgtctcaaaaaaaaaaagagctcaatgaatatctgctgaatgaagaaatacaatggttgacaggaacaggaaataggaactttcatacatttctggttggaataaaaattagttcaccatttgtggaaggtaaatacttacatagcctctgtgttctaactgcatttccttagattctctattagtctatttggcactcgttcatcaagaggccaattatattaactatattttcttattttctgtattcttgatgctctggcatttggggaccttaccaaaaacagggagaggctgctcctctcagggctaattcctaaagataatcacagttttccaatgagcacagcttacatatgcaaaccaaccaatcctgagtctatacctctctgatattgtgatgtaataagaaatatgtattttggtctttatccatgcccatggttcttggttcatgggtcctaaaacccttgtagtttcctaaacagagtattttctgttaaaacacttgttcttagccaagtgcggtggctcacacctgtaatcccagcactttgagaggccaaggcaggcagatcatgaggttaggagttcaagaccagcctggccaacatggtgaaaccctgtctttactaaaaatacaaaaattagccgggtgtggtggcgcacatctgtaatcccagctactcgggaggctgaggcagaattgcttgaacccgggaggcagtggttgcagtgagccgagattgcgccactgcactccagcctgggcaatacagtaagactttgtcttgggaaaaaaaacaaaacaaaaaacaaaacaaaaacacttgttcttttgtccttggttatgttctgaatgtgttccccaaaatt[131 bp omitted]catggtgaaaccccgtctctactaaaaatacaaaaattagccgggattggtggcatgtgcctgtaatcccagctacttgggagactgagacaggagaatcacttgaactggggagatggaggttgcagtgagccaagatcacgtcattacactccagcctgggcgacaaagagagactctgtctcaaaaaaaaaaaaaagaagtggagcccttaggaggtgattaaattatgagggaagagcctacatagatggaattagtgctttcaaaaaaaggattgagggaatgggtccagcccttcagtaccttctgacatgtggggacacagcattcctgccctgtggaggatgcagcagcaaggtcccatcttggaatcagagagcagacctaccagacacctatcctgctggcatctcaatcttgaacttcccagcctccagaactgtgggaaataattttctattatttacaaattacttttcaggtattttgcttctcaggtattttgctgtagaagtactaagggactaagacacttcagttcctgaaatagcaccagagtaataaatgtgaaagatgtctttactgttcattaaccaacccctttcaaccacaagtgagttaatgaggtgaagttagtaaagcccctacataaccacaggatagggcaaccaaacatgtgattagaatgttggaaagttctgccctaccccatgacttctgggaaaaggaaaagggctgaaggttgaactcatcaccaatcgctgctgatttaattaatcatgcctacataatgaagccttcatagaaacacaaagggctgagttcaaacagcttatttcccggactaccccacaggcgttttcttttttctgttttttaggagacattggtggggtaaacatacaaaaatgtgattgcctcactcaaccaagagccttagccataattaaaagatgttcagatggagctgtacaggaatgtgatgctggagaactagagcaacagagccacattaggtatagatcgcttgcctgtatagtccaaattttgttgtttttgttttttgggtctttttgtttgtttgtttgttgtattttgttttgttttaaggagcggagagtttaataggcaagaaggaagggagaagacagaaggaagaagttcccccatacagagatgggggttgggggggtggtggctccaaagccgaaagaggaggtccccttgttttttgggggttttttgagacggagtctcactctgtcatccaggctggagtgcagtggtgcgatctcagttcactgcaacctctgtctgccgggttcaagccattctcctgcgtcagcctccaaagtagctgggattacaggtgcacaccaccacgcccagctaattttgtatttttagtagagacggggtttcaccatatt[137 bp omitted]caggctggtctcaaactcctgagctcaagtgatcctcctgcctcagccttccaaagtgctgagatcacaggcatgaaccaccatgcccggcccttcctgccattgttaaaagcttcaggattatattttacatcagcatttcctgttgtcatacacttcctgccatcatatttcggcaacctctaccacctcccaaagtttctagcttaaaaaattattgatttcctcctagctcccctttctgtcagttttttaattttatatttgttttcaaatgagtcctcacattgattttaaaaatttaacaagagtatagtgaaaaggaagttcccctttcactatttatcttccccatatgcatctattatgacgggtttcttttttaaactacttggagtactcataactgattttgtactctagttcagaagaaatgtctgaatgttaaatgtttacataaaaaatgctattttattatatcagtaatggagcttcccccctttaaaactgctgcaccaggaagatacaaccttgttatcacaatttaaagagaaaatgagacttggaggttcagattcctccacagtcatagtatcagctacccacgcagtgacccacattcaggtgattacacacactcatacacagatccatacacgatcttgccccccccacctccacacactcaatatgacctccccacgcccaaagctgcacacatcttgacctcacttctctcacacacacaccaatctgacccgcacgcggtttctttcactcaactacccagacacccctcatcccaccagcacaagcaggcccaccgcggtctcacacacactcgagccttcctttgcccagtctcacatgcatgactgggatcgcggatttgtccccttccgactccccatgctggttcggtcccagacgctcaggtgccacattggggtgcgctctcccggctcctccacacgctacgcagctgcccgcctcaagagcgtctgcgtgcttccagcgttaagtggaattccaagcagcctccggggcacagttagtctggtcactgcggccagactgccgcctcaggacccagagaacgcagcacactttagttgggcccatctatccccggcgaggcttggactacgtttcccaggagaccctgcggtccagtatgtctcccgaggaggggcggaagcccgggagccgccctctgaggctgggcggggtgaaagaaagcttgccccagaggacttaaacaggcaagaaggacttggttaaagactattgcaatagtcaacttccaatacaacagcagctggagatttatagctaacgggctgggtgaaggagttaaaggatgctaaattactaagaggaagttaagtatcaagagtggggggattgttactaaactggcttagctggattcttgctgaagtgctgttcgcaggctatggaggaggcctggccaagcaaaaagggctcagaggagcctgactaaagcttggtctagggactccttgtcaggtgagactcccggaaggctccgatgggcagctcacctcaaagagatagttttgttggtgccagagtccgcgccaggggaatcgggatggctgggctgtagctttcggcaacctgtcgctttctggactacacttcccagaagcctctaggcccagggcactctcccgcgataactagattgtctcttgaggagtgggcgggatcttcccgcggatttgggcaagcggccttggggctttgtgagatagctagggtcgacttgtgtggattctagtagaacggagctgaccctatccgaacaggcgtaagtgaggcggctcggagcctggcgcgacaggaactcccgacctgtgtgggctgcgtggggaacaggctaaggagcgattgtgaggagtgtgtacggttgtgactgggggcgtgtgtctgtgcgaccgtgtatggaactgtgagggcggggaggaggactttttgtttatgtttgtgcgggtgtgagtagagtttaattgtgaccgggttgggcactgtgtttgcgagtgtgaggttcctggaccgcggttgtgactgtatgtccccttggggtgtgtgtgtgtgtgtttactaccatttgccgaactgtgtgtagtatgccttaattttgaggtttgtggctgcttccgtgtgtgtgtgtgcgcgcgcgttggtgatattgttgatggagggtgcgtgtgaatttgttgtcattgtgaccccaaggtgtatgtcactgggaatttgagagatgcccacggactctgtggttgtgtccgtgtctacccccgtggtgtgtatgagtgtgtgattgtgtgttgtgtttaggtttggggtgcctgtgacgtttatgtccctgcggtgtgagtgagtttgtgtgactatgtgtccgtatagccaatgtaggtatggggagtctttgtctttgtgacttcagccattggagacccctgtgagctcagggacaggttctgcccagaacggcattgaccctaccgttgtctgtgatgcccggattaagcaggatgccctagacttctctgaccttcctctgtaggtgatgggcagtaggggctgagcaaagataacttctgacatagtcaaaccaactccctctcagaagaacctgatgtttcctgactgctttctccttcctcagccctgccctgcttggatagaggcctccgaacaggagtaaagaatggctgttgaacatccacaaggcacctgcaaggtagcttgtcctgtcctcttgtttaagaaaaatccctttttctttgtcaggacatagttgctttccttctcttgaaaattcttgcctatgagatgacctgatccctggagtttccattttgagaaaatgtggtgtcttcaaaccccacctcccacacctgattttcccttactgatttgtcagatggttttaatttttctttttcttttttttttctttctttctttttttttttttttttttgagacagaattacaggcgtgagctgctgtgcccggccttatccttctactcttgatggacatttgtcttgtaatttttggctactacaggcagtgtgactatgatcattttgtgcgcatattttggtacacatttgcttgcatttctttagaatatatacctagtgattaaattgctgatagtggctggatgcagtggctcatgcctgtaatcccagcactttggggggccaaggcgggcggatcacgaggtcaagagatcaagatcatcctggccaacatgaggaaaccccgtctctactaaaaacacaaaaattagctgggcgtggtggcacgcgcctgtagtcccagctacttgggaggctgaggagaatcgcttgaacccgggaggcagaggttgcagtgagccaagattgtgccactgccctccagcctggtgacagagtgagactccatctcaaaaaaaaaaaaaaaaagtgctaataggtagggtttgtacatcttcagttttaccaaacattgccaaactgttctctaaagatactgtacttatgccagcagtttacaagagttttcttagctccacatccatgctagacatcataaaactcttaaatttttgccaatctggtgggtgtctaatgttatatttaatttaaatttcctttattgctaataaagttgagcattgattcttggccatttgaatgtccccttttttgttttttttgttttttttttttgagactgagtctctattgcccaggctggagtgcagttgaatgtccccttttataaggtgttgttcaaatatttgaccaatttttaattgggtttttctctgatttacggcagttgtacatatgtgtatatatcttctgtaaattaatcttttttcagttgtatgtgtgataagtattttcacctgctctggtttgacttttcactctatgtggtgccttttgacaaatagaagttctggatttcattgtaataaaatcatttcctatggttagtcttgtttaagaaatttttgtctacctcaagataatgaagattttctttggtcttaaagccaaaagcttgctttctttctttcttttttttttttttttttttgactcgaagtttcgctcttattgcccaggctggagtgcaatggcatgatctcggctcaccacaacctccgcctcttgggttcaagtgattgtcctgcctcagcctcccaagtagctgggattacaggcatgcaccaccatacctggctaattttgtatttttagtagagacagggtttctccatgttggtcaggctggcctggaactaggtgatctgcctacctcagccttccaaagtgctgggattacaggcataagccaccgcacctggccaagccgaaagctttctagggtaggctttaatgtttaggtctttacaccacctggaatttttatagggtaggattgaatttcatttttctcccgagtgtgtatccagttattatagtatcatttattggaaagttcatattttctgcactgatatgcagtgccattttagtaaaaaaatcaagtgaacatatatgtctatgtctatttctggattctgttccactggtctatttgtcactcctcgcagtaataacatactgtcttactcactgtaactttgtatttggagcaagtacacttaccttctttttcctcaagagtgtcttggctatttgtgtttctttgtattttcgtgtcaattgttgaattagcttggttccacccaaacatctcttggaattttgatgaaattgcatggtacgtataattttttgagtagaaatttggaaactcttctacacttgatctgagccaaaaggccaagagacaatgggggactcttctaataacatgagcctctcagtggatgtaggtcttagtgtttctcaacaaggtcttgtttatctcctataaatagttctagacaagtaggaatcacgtaattcgttgtacagagtattcctttggcattgactgtctggaatctgagcagttcagataatgatcaatcatagtgataattttagcctgggttttgtttttttttttttttattgagcacctatctcctcctgcctgtccttgtccccctcctccacctcttcctcctcctcaaaaagcagctgtattagaaagactaaaatgtatggtaacttgaacagctaggttgtacaagaaaggaattgaaaattccctttctgatgtcttccaaaacttgaatttcatttaaatgcaccttattctttcctcagacctctaacttcaccctggagttgagcagaaacatggcttgccttttccctcagatcagtcttggactccagacaaagggttggaactttgagccaataagcaggttactggtaacagtgcctgaggaaagacaaagctatgggtgtaaggttctttatatacggtatcctcccactcctatcttctccagctctttatgtactaatataatttttaacattttcttttattcttggccttctcaaatacgtttttggaagtggggatatgaaaattagatttagatgtaaatgtagatatttattgtctaatattttttatgttagtaacatctggtacaatcaagcctgctttttcgttatcttttactcttctcacttatcagatttcttttttttcttttcttttctttttttttttttggatggagtctctctctgttgcccaggctggagtgcagtggtgcaatctcgggtcactgtaagctccacctcctgggtttgccattctcctgcctcagcctcccaagtagctgagactacacgcacccgccaccatgcccagctaattttttgtatttttagtagagacggggtttc[141 bp omitted]ggagtgcagtggcgccatctcagctcactgcaagctccgcctcccgggttcacgccattctcctgcctcagcctcccaagtagctgggactacaggcccccgccaccacgcccagctaatgttttgttttttgtatttttagtagagacggggtttcacg[138 bp omitted]ttgttgcccaggctggagtgcaatgatgtgatctcggttcatcacaacctctgtctcctgttcaagtgattctcctgcttcagcctcccgagtagctgggattacaggcatgtgccaccacgcctggctaattttgtatttttagtagagacagggatccttcctgttggtcaggctggtctcgaactcctgacctcaggtgatacactcacctcggcctcacaaagtgttgggattacaggcgtgagccaccgcacccggcccatgtttctttttaactacgcttttctcttcccgacctatcacctccactgtgctgtgtgaggtaatttctgcctctacatctttgccatcttttcttaccaactctttagttcacatattgtcttcattgggaaaaaagtcatctcagattattttacccacactagccttatctctctgtaatacgacataaagagcgtgaccttaagtatcagaaaaatgtggcatctgatttcacccataccacttgtgagtttaacctgtgaagaagagataataattttctgtcagtgtcgtcaagattgaaataacttatgtgcacaacacttaatacacatcaggtgttgagaaaatgttatttcccttctttacttttctttcttgggacctctatatcaattacagtagaaagcatttaactaaatgcctttggtttttcccaaaatatcttatatgtaagttttgctccctacctacattgtaaatcatttagaaccaggattgtgactttccgttctcttatatataacttttcaatccattttaaatttgttttgctttgatttggggatctaaattcaattttttctcatttacctggtcttattcccatattatttattcagtgataacttatttgcttttctcttactttgtactgcctacttggtgatattataagtaattcgtattatatatttgaattttttttcagttctttgatttatgtctctgtgcttccgcctgaaccatgtttagattttctttcaaaaacctttgaatacatgatcagatgtgtcacttcttaagattgttgtatttggccaggccagtggctcatgcctgtaatactagcacattgggaggccgaggcaggcgcatcacctgaggtcaggaatttgagaccagcctggacaacacggtgaaaccccatttctattaaaaatacaaaaattagccgggcatggtggcaggtacctgtaattccagctacctgggaggcaggagaatcgctggaacccgggaggcagagactgcagtgagccaagatggtgccactgcactccagcctgggtgacagaacgagactccgtctcaaaaaaaaaaaaaaaagattgctgtattctttattttcattacaaaaagaattccttattacaacacatttagaaaatagaaggataaagaaaaaacaaaggtcatctgtaatcctatcaattagatataactaccatcaaattgttacagcaaatacttagaattctttttttaatgcaatcgttgtgtagctattgatctgtgtaacctgtgtttattatgccaaaatacatatcaacagctgtccatgttaacatttatctttatcacgaattgtaatggcctcatagagttatttcaccaaggcttttttgttgaatatagtttgcttacaaattattggctttataaataaccatctactttggccaaatgctagtgcttgtttttttccttttcagtaaaattataattatatacataattaatgaatatatttttcttataaaaattgtttatttatttatttattttgagacggagtcttgctctgtcgcccaggctggagtgcagcggcgccatcttggctcactgcaagctccgcctcctgggttcacgccattctcctgcctcagcctcccgagtagctgggactacaggcgcccgccaccacgcccagctaatttttttgtatttttagcagagacggggtttctc[140 bp omitted]acttcacagtacactcagttgtctctaacagaatctgcttttctaactgccagttaggtcacttatagctgcataaggtacaaaatagcacttagaacaaataatgatttcatttcatttaagctattctttttttgtttgtttgcttgagactaggttttgctcttgtcaccccggctggagtgcaatggcacgatcttggctcactgcaacctccacttcctgggttcaagcaattctgcctcagcctcccaagtagctgggattacaggctcctggcacaacacctggctaatttttttttgtatatttagtggagatggggtttcaccatgttgtccaggctggtctcaaactcctgacctcaggtgatccgcccacctaggcctcccaaagtgctgggattacaggcatgagccactgcgcctggcctaagctagctattcttaaccttggttactaacctctggtcccaccctcagcaattctgatttaattggtctggggtatggcctgagcatcgccatttttctcattattgttttaagactaatcaagcccatttttcttattattgttttaagactaatcaagcaaagcagtgagaatggagaaggaacaaagaaatctgtaactggttgtgatcaattagttgtaaacaccacttgcacttggactagccaatcacaatttttaaaaggtcaccagatgactctatgcactgccacaattgagaactggtgacttcagcgcatataagctgatagaaaagcattaaaatttaatttgatgcggagtgggttcaaactttggaatatttaaaaaactacccaagaggcagggtgcagtggctcacgcccgtaatcccagcactttaggaggaaggcgggcggcggatcacctgaggtcgggagttcgagaccagcctggccaacatggtgaaaccccgtctctaccaaaaatagaaaaattagctgggtgtggtggtgggcacctgtagtcccagctactcgggaggctgaggcatgagaccccttgaacctgggaggtggaggttgcagggagccaagattgcaccactgcactccagcctaggcgacagagtaagatgctgtctcaaaaaataaaaatcaaaataaaaaataaaaagctacccaagtgattctaatgtacactcaggaatgagaatcactgagttagacaatcgtgatttgttttatggagctgagcacagtaactggaagaaaaatcaaagtcatgtatcaaggaagtagcggaaggagtagttttggcagaggcaatcaacaatatctgccatatctgtgcacttcctagcaatttattgtatgaaaatacactggtcatcttagtggtgtcttgtgggagagaaaacctaaagtatatggtacatacacataccacgtttaatcagcagtcttctttttaaaaaaaaaaaaaaactttcaaaagctttgggttttgtaaatcttaaacttttttatggttttttttttgttgttgttgacagcctgacagttgctcaggctggagtataggagtgcagtggcatgatctcagctcactgcagcctctgcctccccaggttcaagtgattctcctgcctcagcctcttgagtagctgagattacaggcatgcaccgccacacccagctaatatttgtatttttagtagagatggggttttgc[141 bp omitted]tttttttaattttgagattctttttttgtgacattgaattcaaatctgttttatattatttttatacaggcatttaattctatcaattactttttatttggtaatttcttgatgtccagtttttgatatgtatcttgctcttgtttacctcgtttctaggctgtttgtatttccatttagtttcatatttaacataagaattatttaggaatatgttttgttaactttaaaatttttattaaatttgaaacttgtagaagttaaaagaatagcataaagtattcctgtgtaccactcagattcaccagttgttaccttttgcctatttgcgttatcattctcatatgaacttgttttcttctctctctccctctctctctctgcacacacacacacacacacacagacacaccctacacacattttatctgtaccatttaagactaagttgcagatttttttgtttgtttgtttgtttttttgagacagtctcgctgggtcgcccaggctggagtgcaggggcgtgatctcggctcactgcaagtgccgcctcctgggtacactccattctcctgcctcagcctcccgagtagctggaactacaggcgcacgccaccacacccggctaattttttgtatttttagtagagatggggtttcaccgtgttagccagaatggtctcaatctcctgacctcgtgatccgcctgccttggcctcccaaagtgctgggattacaggcatgagccaccgcgtccagctaagttgcagatattttgcccctttatttcctaacaacaagattattctcttacataacccacagtacagttattaaaattttaacatttatatgatactctaatccatatttaaaatttttgattcatcccagtaatgttctttataacaaaccaccctaccctttctcctcatctatccaggatccactttaaaatcacactttaaatttactaattatgtctctctagtcttctttaatctggaagagttgctctctctttgtctttcatgatcttggaatttttgaagaggagaagccatttattttgtaaaaagtcccttaatttgggtttgtcttctggttcttcatgcttacattcaggctatgaattttgtggcaggaataccataaaggtaatattgtatccttcttgctgcatcatctcaggagatacatgattttgatttattccatttctggagatgttaactttgataatttgttaaggggatatctaccatgtttctccactgtaatattgacagttgtctatttgtaattaatagataatttgtggagatgtactttgtaactgtgtaaataactactcaccaaacttttccccactagtttaacatccatccactgataattattcttgggtctgttattagtaagatgtaatagtaataatgggagggttttttttttgtttgatttctatcgccattattttgtctgtattaattggttggcattctactataaagaagagctttcccttctctcccacttattcgtttatgtcaatatgaattcatagatgtttactttcctcaatgggttataatctgttgttatttatttttatactcaagttgtcccagatttggccagcaggaacccattctggctggcttctgtgttcctttgacttgtctccatgattctttgagcatttccttacttcctggaatgataagatgttccaggctcattcctaaatactgtcttagctccagcctggaatgaatcatttctctaaagagctctggttccttgcaatgtgaatatttggaaaccaatatctaggtgatgggactgcagtgttcattcttgtcacaacctgttccatatttatatcttccttctgtagtagtaagaaacctggcttccattatcctcattagatttacgaatttgttcaagtctagaatttatacatacagaatgtgagaatgctaacctatactgtggtaaaaatcaagaatactaagtagggttcagtatttgcttatagttctctttatctttttatttttatttatttatttatttttgagacggagtctcgctctatcaccaggctgaagtgcagtggcgtgatctccgctcactgcaacctctgtctcctgggttcaagtgatcctcttgcctgagcctcccaagtagctgggactacaggtgtgcaccaccacgcccagcaaattttttgtatttttagtagagactggttttcagcatgttggccaggatggtcttgatctcttgagcttgcaatccgccagcctcagcctcccaaagtgctgggattataggcatgagccaccatgcccagcctttttttttttttttttcttgagatggtgtcttgccctgtcacccaggctgcagtgcagtggcatgacctcggctcactgtaacctctgcctccctgttccagtgattcttctgcctcagcttcctgagtagctggaattacaggtgtccaccaccacacctggctaatttttgtatttttagtagagacggggtttctc[131 bp omitted]gtaatcaaaatattgtgttctaatttacttggatttggttttttcccccattaaagttgcttttgttattcatttgaaatacatttaagtttgttagttcctaccgtttggccttttttattactctgttcttggtgacttgattgtatgagtatgtaaaaatattagcatgctaccaaaagttaaaactagctgggtgtggtggctcacacctgtaatcccagcactttgggaggctgaggcaggtggatcacttgaggccgggagttcaagaccagcctgggcaacacagggaaaccccgtctctaccaaaaaatacaaaaattagccaggagtggtggtgcacacctgtaggcccagccacttgggaagctgaagcaggagaatcacttgaacctgggaggcagaggttgcagtgagccaagatcatgccactgcattccaacctgggcgacagagtgagacccagtctcaaaaaaaaaaaaaaaaaaaaaaaagttaaaactatgcaaaaaggtaaagttagagcatcatcactctgctcccacaacccttgttttggtgcgtgttaatgggctcaattgtgtcccttccaaaattcatatcttgaaagcctaaaccccagcgccttagaatgtgaatgtatttggaaacagggcctttaattcagttaaaatgaggccattaaggtgagtactcattcgacctgactcctatctttataagggaggaaatttggacacacagagagatgccaaggatacacacagaggaaagaccatgtgagtgcatagcaagaaagtgaccatctgcaagccaaggtgagaggcctcagaagaaaccaaacccgcaatcagcataatcttggactgatgtccataactgtgaacaaacaaatttctgttatttaaaccatccagtcagtggtattttattatggcagccctagcaaactaatacggtgagttatttcctcctgggtcatactatatacttgtctctctgggttatgctgagattggaccctcattataggtctataatgaggattgagcatttccttacttcctggaatgagaagatgttccaggctcattcctaaatactgtcttaacagacaacatttctggtggatcttaaagagaatgagcatgccctttgcactactccagatgatgttatcatagggttttcaaccagaggaaaactagtttctcaaatgctggattgcaagttatttccactagtaagagagatccccacagtgatttaggagttcaagattgccagtttcatctgggtcccatccgtatgtcccaactccaaatttcaggttcctattctttgccattcttctttcacatgaaaaatgtggcaagactgtgaattcaacattcatcataattcagcaagctgagcagttctgtgtttttcagcaatgtcagccctttggctacaagaaaggggagattcttttaggatttttatggaaatgctctcattctcagattgtgacttgaactgagagttaataaacctgggcttatcagcttctctttatgcatttaagttaacataagttaatccatcccacaccgcagtccttatatcattactgccataatggtcaagtacagcaactatttagctcccaaggcatgtgctttaattgacacttcattccaatcaaccatggcctaattaattgtaacattactgcatgccattaatttctaccaacccaaatcccattggcatggaactctgcactgcagtcaatcccaaaggattagcaaaaagatactaaaaggcatgaccaaactaatcccaaagttccatctttacaggcctttcacttggaacgacatcagttaccaattctgttgcagtcaatatctaatcaaggaacagaaaacacagcaatttgaactaggaaagtttaatataaaaaattattaaccatcgtggaactagagtaacaaaggattgaccagtaagaagtaaaggaaactctaaaaaccatgggaattacagccataaagagcagccattgatcgggcatgatgcctcacatctgtaatcccaacacttggggaagctgaggtgggaggataacttaaagccaggaatttcagaccagatcctgtctctacaaaaagaaaaataaaacagccaattagccaggtgtggtgcatgtgcctgtattcctagctacttgggaggctgaggtgggaggatggcttcagcctaagagtttgaggctgcagtgagctatgattgtgcctgggtacctgggtgactccagcctgggtgacagagtgagaccttgtctctaaaaaatttaaaaaaaaaataataagagcagccactactaatggtagagagtccgaggaagacgccctcccagggttaacatccagcccttgttggagagtgcacatccgtggctcattgaatgacagtaattgctgtggtaaagggctgggactaagatgaggcaagtgagacggtgagaagcactcaccgtcagatgtaactacacttggatgaccctgagacggaatgcctcaaattttgcaccctgggttcctcattcttaagacagtcatcgtcagggttatacgtgcagggttggcatctgagagtgaaagcctcaagttttgtgccataagtgcctcacttgccttagccatgtcctgttcctgctgtggaacttgctggaaatctgtgctctagaatttgccaggaatccatcctgtgtggcagactgggttgtcttaccagaagcatttgctacaaaactttcagacaaggctactgggtgctgctggccactttgtactttaagagccgggagctagagaagctgcttgactgaggaagcctggtaaagtcacccatgctgcaggaactgggtgctcgggaaactgaatgtgctgcaggaggtggacctggattctggagccgcctgccagcaagcatgccagaaccagaaaggaacgccccttcctcctgcagtgtctttcagacatccactactggcaaagcttaacattgttctggcaaggaaaaatatttctatagcccaggtctgcttttgcagagtgaaaaaatggtgaataaagggtgaatttggaacttaggggcaatacattgataactagcacatagtcttctaagagttttaaagttaattttttaaaatgtaagtcatttatctaagactgactttgctgtgagatagggatataatacttttcaaaatttttatttatttatttattgatagagacagagtctcactctgtcacacatgctggagtgtagtagttcgatctcggctcactgcaacctccacctcccaggttcacgtgattctcctgcctcagtctcccgagtagctgggactatagatatgtgccaccacgcccagctactttttgtatagtacttttttaaatggatagatgattatatcttttgaatttttccatataggcaatcataagatctgcaaacatcacttttgtttcttgctttctagtacttacatgttttatttgctacagcctttacggacatgcacatatttgacgtgtcccttcctggtttttgtaggtgctgttcatcagaatgaggaaattaccttccactcatagcttgttcaagttttgtgtttcttcttacagtaactggatgttgggttttatcaaattctctgattgttgtagacaattgtgcatttttctctctattctgttaatataattaattaactgatttttcagtgttgaagcaaccttgtattccttggataaaatcaacttattcataaagtttgcttttttaattattttattcagtttgctagagttttatttagggtgtgtgtgtgtgttcataaattatattagcccaaaattattctctcttcatatttagtattttgtcttatttggtatcatggctgttagactactttcatcagataaactgaaaaatgttctttctgtttcttttttcttcttttcccctcaaagtttgaggtttttcctgaaatattttatatattcaaatacataaaatctttttaggttaagtgataatacccatataaccaccatgaagattggaaaaatacaacattgctaataccacaaagccatctgcctgcccaaaccaaattaatctctttcgctctccactgaagtgtaactattaagtagattttgtaaaaatcattctctgctattataattttttgccaactttgtataactccctaaagaatattatacagctttgcctgcttttaaacttatgtaaattgaataataatatatgtgttcttttaagttttgttttgttttgtcttttttgagacagtctcactctgttgcccacgctagagtgtaatggcataatctcgtctcactgcaacctccacctcccgattcaagtgattctcctgcctcagcctcccaagtagctgggattacaggcgtgcaccaccaagcctagctaattttttgtattttttagtagagacggggtttcactgtgttggccaggctggtctcaaactcctgacctcaagcgatccacttgcctcggccttccaaagtgctagtattacaggcgtgagccgccgcacctggcccatgttgaatagtttagatatatcttgtttatctccactattatttaataacctttatgactatatcacagtgtattttgtccaacatattttttatgtggataattggtggtttccagcattttactcttaataaaactgttatgaacattgtagtggatgttttacctaggagtggaattgctgggtaatagggaatgtgcatgtgttagcctagataaccaaactctttcaaagtggttgtatgaaaaagtggtctacttccaacagtgtatatttgccgccgcctttgccacgtttttcccacatctttaccaacatttggaatagtcacactttttacctacctagtatacttagtaatatctaattatggtgttaatttgtatgaccatgactactgatgaaacagaacatcttttcatttgtattatcttttatctccttttctcattttttccccaagatttgttcttttaggcaaaattcacatgagatacacttaaccattttaaagtgtataattcagtggtatttagtataaattcagtggtatttgctgtattcacaatattgtgcaactattgattctctctagttttaaacctttttcatctgcctctagaaataccctgtacccaattgaagcacaaacttttaacttggatgaatttaaattgatgtattcttttctttcattgcttgtgctttaggtgttaaatttaagaattaattgccaaatctgaggtcatgaagaattagaaattctgtttttttgaaagaattttatgatttagcacttctgtttaggttgttgatccatcttgagctcacattttatatttgcatgtgtttatccagttgtcccaataccatttgttgaagagacatttctttctccattcagtggacttactatccttctgggaaatctattagtcatagatgtttgggtttatttctggattttcagttttattccattagtttacaagtctgttcttaggccagtcctattgattactgtagctttgtagtagtaagttttacaattgtaagaagagagtcctaccttttcattttcaatacacattgcagttccatatggattttgggtaccaattgcagttccatatggatatgaggagtggcttttttttttttttttttgagtcagagtcttgctgtgtcgcccaggctagagtgcagtggtgaaatctctgctcactgcaacctctgcttcctgcgttccaaaaattctcctgcctcaggctcccgagtagctgggattacaggtgcgtgccaccacgcccagctaattttttttacttttagtagagacagggttttacca[140 bp omitted]caataccattttttgaagagacatttctttctccattcagtggacttaactggccttctgggaaatctattagtcatagatgtttgggtttatttctggattttcagttttattccattagtttacaaggctgttcttaggccagtccttttgattactgtagctttataatagtaagttttacaattggaagaagtgagtcctactttttcattttcaatacacattacagttccatatgattttgggtacccattgcagttccacatggatatgaggagtggctttttttttttttttgagatggagtcttgctctgttgcccaggctggagtgcagtggtggagctcggctcactgcaacctccgcttcctgggttctaacaattctcctgcctcaggctcccgagtagctgggattacaggtgcgtgccaccacgcccagctaatttttttacttttagtagagacagggtttcaccatgttggccaagctagtctcaaactcctgacctcgtgatccacccgcctcagcctcccaaactgctgggattaccgccccgcctggcttttcatttcaaaggccactgaagtgttaatagagattgtattgaatctgcagattattttagcgagtattgccatcttcatgttaagtcttctaatccatgaacatgggattttaatctatttaatctccaactgatgtactgcaattcagttctggtactagctgcccagagttagtgtcagactccataggttttagcatacagtccccagtaaatctgcccttactttaggccaactagctacaattccaggaagttcccatgactccctccccctccccccttcatttagtaatttactacaactcacagaattcaggaaagcactacacttaaaattatagttttattatgaaagataaggatacaaattaggaacagcacagtaaagagacacatagagcaaggtctgaaagggacctatacacagtttctatgccctttcctggtgaaagcagggtgtgtcaccctccaaacacattgatatgttcaccagtaaggaagccccactgaactttggggtggaatttcattatgtaggcatgattgattaatcattggccacatgactgaactcagtctccagccccactttcttcctcagagactggctagctaaaagtatttttgatgactgccccaattctgaagctactcgggtccaccatgagttacctcattagcataaactcaggtgtgatccatagcaaagacatgtctagctctgtgctaggaaccctaggacaaagacctgacaaattattacacagggcataaacaagaccaggagtgaatatggcagtgttttcttatttatttagtggtttcttttctcttggatcatttagctttttttttttttttgagactgagtcttgctctgtcgccccggctggaatgcagtagcgtgatctcggctcactgcaagctctacctcctgggttcaagcagttctcctgcctcagcatcccaagtagctgggattacaggcacatgccaccacgcctggtgtgccaccatgcctgactaactgttttgtatttttaatagagacagggtttcaccatgtgggccaggctggtttcgaactcctgacctcaagtgagccgcccaccttggcctcccaaagtgctgggattacagacttgagccactgcacccagcccatttagttttttattaatgatttgagaaagatcttatattttacctgctagttctttgacagttaaatgttttgtaaatatcatcacccattctgtggcttgcgtctttttaacagattttattcataagtgagctgtgaatcacgcttatatttttacgcaactttgttttccatttaattactattacctttttgtccatatatttatcactaatttatattcaaaatctactggaaaataaatctttttccagtatgttctgtcagtttcttgggtttagagacatctcttctatgatcctttttttctctactgactgcttgtaccactattactctagaattctatctttttaaattcactgcccttctgcgttgagttctttgtttcttggattccttgccttcctgtttcttggtttggttcttcttgatattggtggcatgtgagaaaggatgaatgagaattaaattttgtgagttctggtatatttttcaaccactatattgattctttggcagggcatggaattctacattaaaaatatttttcctcagaattttaaaattatgatctctgtcttatagtattgtttagaactccaaagccattttcattcctggtctttggtttataccctgtctttgcatattggagccttttagggtattttctttgttcccagtgtcctagaacctaataaaaatatatgtaaatgtaaatcatcttttttttatactacataccaagtggacccattaaatatggagactcatttctttcaggtctgggaagttgcccttaatgctactttttagaacaatctgtattttctgttttctttgaaaaatttcaaacatagagaaaaaaagattattccagtgaattctgaatacccattttcttcctctgtttgggccactgtaacaaagtaccataaactagttatcttataaacaaaagaaacttatttctcacagttgtggaggctggaaagtacatgatcaagatgttggcagattcagtgtctggtaaggacctgctttctgcttcatagttggcaccttctctctttgtcctcacatagtaaaaagggaaaggcagtcctctgggtactcttttttaaggacattaattacattcatgagggctctgccctcatgacctaatcacctcccaaaggccccacctccttaccccattacattgataactaaagttcaacatttcatttgggggttgggaggacacaaacattcagactctatcatccatcacccaaattcttcagttgttgccattttgccacatttcctttatctttattaatacacacacatacacttttttttgtgagtcatttgaaaatatgttggggacatcttcacattttaccattaataattttaacatatatctccttagtattaatgatatatctccaacctaaggaaattaaaatagacttaataatattcttaagcattttatatttagacagctccagtagtcttcaagctctctttatttagctgctattgtgtttgtttgtttgttttacttgggtatgtgtttgcctgatctaggatccagtcaagatttatatattgatttggtcattggatctctttagtctcttttaatctggagcagtctctcattttttgttttatatgactttgaatttttttggtttttttgagatggagtttcactcttgttgcccaggctggagtgcaatggtacgatcttgtcttaccacaacctccgcctcctgggtacaagcgattctcctgcctcagcctccctagtagctgggattacaggcatgtgccactgcacccggctaattttgtatttttagtagagacggggtttctccatgttggtcaggctggtctcaaattcccgacctcaggtgatctgcccaacttggcctcccaaagtgctgggattacaggcatgagtcaccatgcccggccctgttttatatgacattgaatttttttgagaatccaggacaattattttatagaatgtcacataacctttatttgtctcatggctttctcatgtataggaagcttagattcaggttaaatatatttggcaagcataccacataggtggtatgatggtacatcttttattgtattacattgggaggaacatattgtcaggttgctctactactgttgatgccaagtgctgtatggatgtttgtcccctccgaatcttatgttgaaattttccccccattgttggaggtggggcctaatggcaggtgtttcagttatggggatggatccctgatgaacagattaatgccctccctggggggcagtgggtgagtgagttcttgctcttattacttcccaaaagagctggttgttaaaaagaacctagcacctctctcgaccctctcttttgcttcctctctctccacataatctctgcacatcccagctcctcttcaccttctgctagtggaagcagcctgaaaccttcatcagaagaagctgttggtgccatgcatcttgtacagcctgcagaactgtgagccaaataaacctcttttctttataagttacccactcttagatatgtcttcatagcaacacaagtagactaaggcatcaagttttaccacttaagattaaggtggtgagtaccaaatctttctattaaacaggtatatatttttccctttataattaataaataatctgtagagtgatactgtgagatcaagtgaatatccttttccgcagcacaattcattatccagctttagaatccattgaggatcctgaatcttttatcctattgacgatttttaaatggtgattttcaggttcctccgtttcttctagcacactttgtagattcttagcaaacttctaaaaatgatttcttctcagtagacgttggactttgttgcttgatctcccatattttcctattttccatttctgtatcttttttgtatgggttttaaagatattttattatttacttttgaatgatttgtttttattccaactttatattttcattttctatgaatacttttttcacttaatatttctttcatattattctattcttgtatcatgtggagtagcttctcatatccttatgagaatatacgttgtgacttttgaggttttctttgttctcctatatagtctgtcttctgagttgctttggttgctttgtttactgtcttttatcttacaggcttttctcaaatatctaatatttgcctattttttgtttctgttgtttttgtatatatttaagatatacaacatgaggttttgatacatattatgaaatggtgactgtagtcaagcaaattaacatgttcatcatctcacatagttacactttttgtgtgtgtgtggcaagagcacctaaaaatctactctcatcaaaaatctcaaatacaatacaatgtcattaactatagtcctcatgttgtacattggatctctagacttattcattctacatgtctgaaactttgtatcctttgacctgcatctccccattttctccctgacagtccctggtaactaccattctgtatgctatttctgtactttttttttttttttacattctacatataagtgagatcatgcagtatttctcttcgtctcccttatttcacgtagcataacgtcctccagtttcatgtctgttttgtcaaatggcaggatctctttcttttcaatggtgaataatattcatttatatatatcacaatttcttcatctgttcatccatcagtgggcacataggttattttcatgtcttggctattgtgaataatactgctttgaacatgtgagtgcacatatcttcatgaggtagtgatctatttgtaatttagagtgggccctaagaagctgtatgctatatattttgtatgttgattgttagacttttatgggtacttagttccctccacttcttaagtttttctggggttctgcagcataaaccgtacacttttttatacacaaaaagtgtaactatgtgtgggctttccttacttttagttaagattatatcttttttgattggtcattgtttatcttacactttcaacttaaaatgttggctgggcatggtggctcatgcctgttatcccagcactttgggaggccaaggcaggtggatcacttgaggtcaagagttcgagaccagcctggccaatatggtgaaaccccacctctactgaaaatacaaaaatcagccaggtgtggtggtgggcacctgcaatcccagctgtttgggaggctgaggcaggaggaccacttgaacctgggaggcagaggttgcagtgagctgagattgtgccattgcactccagtctgggtgacacgagtgaaactccactaaaaaaaaaaaaaggggggtggggtgccaggcctggtgactcatgcctgtaatcctagcactttgggaggctgaggtcgggagttcaagaccagcctgaccaacatagagaaaccctgtattactaaaaatacaaaattagccaggcgtggtggcacatgcctgtaatcccaggtactgaggaggctgaggcaggagaatcacttgaacccgggaggcggaggttgcagcgatctgagatcatgccattgcactccagcttaggcaacaagagcgaaactccatctcaaaataaataaataaataagctgaaaatgttttgttgctgcagcttcctctttaatttccttttatgtggtggttttgttctgttttacaaattccttttcattccttttagtgaggttttggaaagcgtacggggataaatgcacgtgatccacttgagctttttcagagaaattatgttgtatggctagagaaatctagtttttagatgtttatttgtaaggataatacattttgcaaataatttattatattattcaataaatgcatttaggttttttttgcatgtaccagagttcaagttgattaaattaatagatattatctttgtcttcatgaagcttggctctattgtagcagacagaggttaaacaagcattcaaacaaatatgaaaaatttaactgtagggaatggatacgtaaattacctattatcaaaacaaaacacaaagaaaagaggaaaaaagagctctgagaaatgatagtagagtgtgcataattcagactgaacatgtaggaaatattttaaagatacatcatttagcagagacctaaaccactgccagaaacttgcaaggccaagagtaggggcagtggatatagggggacatttcaggcagatgaaaccatgatggggatgggtcggtacagttttgtgcatttgaagaactatgaagactacatagtagctacagcttattgttgggtggggggtgcagggagggatattaggttgaagagacaggcagatcactgaggaacttttaagagcgagttcattttgagcagaacagttccaggctaaatatcactctgggtgctaagggtgcaaaactggaaatgcaggcaggtagaagaaatgctggtttagtgtccaagcaaaagataattttgatttggattagccagttggagactgaaagaacaatttcaagacatatttagacctgctctaaacaggattgttatgtaagttgtagaaagagattggtgccgaatgttttcactttttgggatttgaggtattcactcagggccttagatagtatctttaaatccattccctttcctagcctctacttttgaggcaaataagtctcccaaaataataagcactgcatagttactttatgcaagtatgtaagtagatttggtgtgatcagaatcattccataatcatcaaagatgaggttcaggatatttatatatcttcatctttcttgcagtcttctagtagtatcacattgcctcctgtcttgtcttccctttcctcttatgttaaaaccagattctgttcctctgctgtagcccttactgagctccatcttctctcaatgttatcatcatagaatttggaggcaaacttatttcttaaatggcataaacaaaccacattctaaccacagatgaatcttccctctccatagctcattccatactcatttagcacattagtctttcattgggaaactgctctttgtggattatctttcttttctgtctccatcagtttatatgcaaattatgtttattactgaaacatcccagatttcccaccccaggaaaaatgtagtactcccaacaaccctgataaatgaatatgagaattactctcatttataaatgtttatagcactagattcatctcttaaaaaattaagacagggccaggacatctgtataattaccaagctttcaaagtctgcaggacttttaaactaaactaaactactatttaaaactactattttaaataaatatctaaactactatttaaaaataatctgtttcctgaaaacctcctccactttctagtctgacttttactcattttctctgcttccctaatctgtttttcaaattgcccagtcatatgtgagaactgtataaaccactcaatttttatgaaaattaaattgtagttaagtctttcgtatctattataaacgtttaatctctcccagaacacaaaaaagtgaatgtttgcttttatattttctttcagactatgaatcaaagttgagaccaagaaattatttctgaaaaaggatatggaaaaccttacaaaacacagcattgagtgttcaagtttcagaggtgattgggaatgtaaaaaccagtttgagagaaaacagggatctcaggaaggacatttcagtgaaatgatatttactcctgaagacatgcccactttcagtatccagcatcagagaattcatactgatgagaaactccttgaatgtaaggaatgtgggaaggattttagttttgtatcagtccttgttcgacatcagcgaattcatactggtgagaaaccttatgaatgcaaagaatgtggcaaggcctttggtagtggtgcaaaccttgcttaccatcaaagaattcatactggtgagaagccttttgaatgtaaagaatgtgggaaggcctttggtagtggctcaaaccttactcaccatcagagaattcatactggtgagaaaccctatgagtgtaaggaatgtgggaaagcctttagttttggatcaggccttattcgacatcagatcattcacagtggtgagaagccttatgagtgtaaggaatgtgggaagtcctttagttttgaatcagcccttattcggcatcacagaattcacacaggtgagaaaccttatgaatgtatagattgtggtaaagcctttggcagtggttcaaaccttactcaacatcggcggattcatactggtgagaaaccttatgaatgcaaagcatgtggaatggcctttagcagtggttcggctcttactcggcatcagagaattcataccggtgagaaaccatatatatgtaatgaatgtggtaaggcctttagttttggatcagcccttactcgacatcaaagaattcatactggtgagaaaccttatgtatgtaaggaatgtgggaaggcttttaatagtggctcagatctcactcagcatcagagaattcacactggtgagaaaccctatgagtgtaaggagtgtgagaaagcctttagaagtggttcaaaacttattcagcatcaaagaatgcatactggagagaaaccttatgaatgtaaggaatgtgggaagacctttagtagtggttcagaccttactcaacatcacagaattcatactggtgagaaaccctatgaatgtaaggaatgtgggaaggcctttggtagtggctcaaaacttatccaacaccagctaatccatactggtgaaagaccctatgaatgtaaagaatgtggaaagtcctttagtagtggttcagctcttaatcggcaccagagaatacacactggtgagaaaccctatgaatgtaaggagtgtgggaaggctttttatagtggctcaagccttactcagcatcagagaattcatacaggtgagaaactttatgaatgtaagaactgtgggaaggcttatgggagggattcagagtttcagcaacataagaaaagtcataatggtaagaaactctgcgaattggaaactataaattgaaattatgtgctgaaggaaggactctaaacatatgacttaagaaaattcatagtggtgaaaatctctacaaatagaactaaggtacaaatgccttacttatgcttcacaggttagtcagtctaagaatatttatacaggaaaaaaatcaccccaaataaaataaatatttgaagatccttatctatattcattccttcattacttttggaaaattcttacttgtgaatgttaaaaatgaaaaaaaaatcatttattatattttgcctcaactttaaacattggaaaactcatttctgggttaatcctactatattttttcaatggtcttttttttttgtattatacagaattactgattcattgaaaaattattttatttattgcaagtctaaatttatcctttttttctttcctgattatcctaacaccatttattcaataaccttgtccattttcatattttttttattgactatttgatggtaagttacatttttattcacataaagcttggatatcaggtcagtgtttttttgtttttgtttttgtttttgtttttttgagatggagtctcactgtcaccaggctggagtgcagtggtgcaatctcggttcactgcaacctccacctcccgagttcaagtgattttcctgcctcagctccccagtagctgggactacaggcgcccgccaccacgcccagctaattttttgtattttcattagagatggggtttcaccacgttggccaggatggtctcgatctcttgacctcgtgatccatctgcctcggcctcccaacgtgctggaattacaggcatgagccaccatgcctggcccagtgtttgttttttaaatttatatatatgtatctatgtctcatcctgtttatggtcaataactgttacttttaagtatcctttaatacctgtaccttttgttttagaagattgtttactttccttttataaaattatactctccattttagcaaaacagctttccctcatcataatgtagataaaaagaaaaaaaggatatggttacctgtaatcttaccaatcatagataatcactgtcaaacttttggagcaaatcctttaatactatctctcattgttttggaaacaaggtgtgattatgctatactataaccagcccttaatattttttgtctgtaaatatgttgttaccattttattggctttatagtattcacctgtctttatcaaaccccaattttgtcaaatattaaaaattttgccattataaacacttaccttgatggccccttttcagtgtgtctgatttatttatttattgttcatttcagagataatgtatcaattgcttttgcatataaaagatttttacattacagataaagccggcctttcctttgagcagcattcctggcctcagttcctttccaatgttaaccaatttacttattcttccagatccttttatatgcatctgtaacatacctatggtaatgtgggtagaatcaatacctcagagccttattgtgtggattctataattgtgcctatcacataataaatgcttagtgaatgttacccatcactattatcttctcaagcttcatctttattatttctagaaaaacttttagccatgatccataccttactcaacaacaaagacctcataatggagaaagacattcatttaaatgaatgtagggaaaatttgattgacattctttccttgttgaataagaatatttgctgccaggcacagtggctcacacctgtaatttcagcactttgggaggccaaggtgggtggatcacttgaggccaggagcctagccaacatggtgaaaccccatctctattaaaaatacaaaaattagccaggcatggtggcgtgtgcctgtagttccagctactcgggagtctgaggcataaggattgcttgaacctgtggaggttgcagtgaaccaagattgcaccactgaactccaacctgggtgacagagcaaggctctgtctcagaacaaaataaaaataaataaataaaaaattgtcctacagaaaaaataataagattataaagtgtgagaagacaaatacactataaaatttgtaccagggtagaagtaaaaaaactagcagttttctccattgaaatccaaatattaattcagtactcatctgcatgattctttgcttaaaaataaaatgcaggcaggcacagtaactcttgcctgaaatctcagcactttgggaggctgaggcaggaggattgctggaagcctggagtttgagaccagcctgggtaacatagcaagcccccatctctacaataaaagttttaaaaatgagccaggcatggtggcctccagctaccagaggctgaggtgggaggatcagttgagcccaggaattcaaggcctcagtgcactattattgtgccactgcactccagcctggaaaacagaataagatcctgtctctaaaaataaatgagtaaattaactaaaatcaaatacattattttttaaataagtggcactgaatagattacatagcaaaacctgtgaggacctgtaatatacagaggaaattttatagctctaaattcattcatttgttagaatgttaaagaaattataaataaagaaaccaagcatataacccaagaagctggagaaagaataactacaacaaaaaccctaaggataatgggagggaaaaataattttagaataaaaaaagctagatcaatcacaacctaatgttttgaaaacaaaaatagtagcagttctcataaataaaggtatatgaacatgaatgcaaaagcgacattactctagagactttacagattacaggttgagcatgcttaatttgaaaattcaatatctgaaatgctccaaattccaaaactttttgagctcaacattatgctcaaagataatttcagacttctggattaagtatgctcacctggtaaatataatgcaaatattccaaaatccaaaacacttctggtcccaagcattttgagggatactcagcttatgtttattacgattacatgtaaccttttaataattattttgaaaattgaacattttagtaaaaggattttaatcaccagaactgactcaaagtggcatagaaatgggtattatataagggatataaagcaaaaactatatctaggaaggctggggaaaaaaaccctgtagccaaagtctcttttataccccccagtcaggtcccttgagtgaatattctggcattcaatcacattttgcattggaaagagcaaaagatgaaaatatatcagcattagtatattttatgtctttttaatttgaggtaattagattttttaatttttaaaaagaatggaataggaatcattaaaaacagactaaagtaacatgaaatcttaagatgctacatataaaatacatcactttaaatatgaaactaatttttaaagtcctgcagattaatctgttggagatatatattgaaacccactttcagagacattaaaatgcggggtaaaaagtgcattttagaactgataaactacttcatcaatgattttaatggttccttttctttagattttcaaattcgttgatattggcaaacagaattggctttcagttttcagtctctgtatatatatttgtatttctactcatagttttatttttaaaccactttattcctctaaattgatttgaaggagtcccattcattttacttgttttttttttaaaaaaaaccttatctgggttttcttcatgcttttgactatttttgtttgctttttctatttcaaaaatatatttcactattttctttttatttgtgtgtatttctgttgagtacatgtgcttggttaatatattttcagtctcttttaaattggaagcatttaaggctacaagatttcctttgaatattgctgtatctggggcccatggtttttttttcttcttgagatggagtctcgctctgtcaccaggctggagtgcagtggcgtgatctcggctcactgcaacctccgcctcccaggttcaagtgattctcctgcctcagcctcctgagtagctgggactacaggcatgcgccaccacgcctggctaatttttgtattttttagtagagacggggttttacca[136 bp omitted]tttaatcttgatttctctttgattcactagttacctaggtgtctgtatgtttgtgtgtgtttctaaattttcaaaaacctgtgaaaaaaatttagcatatgaacttataatgtgtgtgatctgtgaaacttcattaaaaagttaaaacattaatttattatttgtggccaaatatacgttaggtttttaatacattttatagatatatgatgtgaaataatatatattctctataaaacacaaagttctacttaattatattaagcttcgtgattatattatttaaatatcctctgattattttgtttaattctgaaaagtgggcacaaaacgcccagctatattgtttcaaggtcttctgttaatataggggttttactttttatgtttggttgctgtatttttcactgtgatgttgaattccaatttctctaatattgaaaattctgctttggccagtagagctgcactaggtctgttgtgtcagcttgttctaggtatatatccttataaacaccatatagttagtgttttatttttaacccaatttgtttttgtattttaattggagaacaccatatatctataggcaggcttactcaatttctatgaaatcaccttttaaaatatctttttctattaaagagcagaaaagtaactaaaattctcaaactctgttgctctttcctatgtagctactcgtcatggtcatttaatgcatcgtttctcttcatctctctgttccctaaagattgaagttttctaagactcagcctctgacacatttactaattatacttaattgttccttggtgatttcacccccgtgggtttgtttcccttgaactccacactcactacgttcagtagccttctctacactacttgaattatttttatttaggtatataaaatactggtggcaatagcataaattctaagtgttaaacttgatgaagtaatattgtacacctatgtaagcactgcccagactgatatacatttacagcctaaggaggcttctttgtgctgctttgctattaatattccattgcccagaaatagcccctctcctaatttccataaccagagataagcttacatgtttttccacttcatgtaaatggaatcgtacgctgaaccctttttgtgtctggtttcttttgctcaacattatttcatgcaacaataaggatggctctctcagacataatattcatttttatttatgtagtgttttatgggaattgcactgagttagagaaactgaagtctgaaggaatagtttccacaagactgccctcatttcagacaccaggcacaagttcagaggttccaagggctacccatacttcagaccagctgactacaaatttgggacttgtcatgactacccttgataattcagtataataattcacagaactcaagataatactatacctatgattacaacttatttatttttattttttttgagacagagtcttgctcctgttgccccggctggagtgcagtggcacgatctcggctcactgcaacctccgcctcctgggttcaagcgattctcctgcctcagcctcgtgagtagctgggattacaggcacccaccaccatgcccagctaaatttttgtacttttagtagagacg[131 bp omitted]tacaaattacaactagccagaggaagagacacatagaatgaagtctgagaggggtccaaagatgagtcttctggtcatcctatccctatggagtcctggatggcattacctccttccagctacaatgtgtactgataagtgttgcaatccagggaagctcaccttagcctttggtttccagtgtttttcttggggtttgataatatactgcccacatagctgacctttgtctttctgcccttcttgctggtttgtctaatactgtttgtctgccatttccccagaagtcaaaactgagatagcatgcctcaaagcactcatcataaatcatgttatactgtcgggtggccatccaaagcacccagccaaaccaagacactgttattgggcaggacattccagaggcctagagtacccccagtgggcctcccagtacccaaggtaaaggcaagacctctctttgggtgaagttaatttatcactatacaggaatatactttgacttactcattctttcgttgatgggtatctgtattgtttctacaactctgggaaccttcttatacatgtctttatgtagacatatttactcttttctattggcagtatacttcagaatggaattgctgagtcagagataggctatatttagtaaatgtcagttttccaaagtgattgtgcaaatttacactcccacaaagaatctgtaagggtttcatttgctgtatgtcctcttcacacttagtattgtatagtcattctaatgggactatactaatgtattagttactagaattatatatagaaatattatataactattatatagttatataagtatgtagaaagttacattttcacttccaatgactaataatgttgaataccttttcatatgcttgcttactagcttttttgatatcttgtatgcagggttggtaagactttggccgttttaaatgcgtatcgtgtcttttccttattgctttgtgtgaattctttgtgtattttggatctgatttgtttgctagatatgtatgttgcaaatgccttttgctttgtggcttgcatttccactctcttaaaggtatgggttgatgaattggagtttttaattttaatgaactcctgtttatcaacctttttctatatatggttagaactttgagtcttaaatgtttgtgtgcgtgtgtgtgtgtgtttcatgcctacaaacttatgaaggtattctctttcttcccctagaggctttatttcaccactcacatcttgcctgggattacaggtgtgagccaccgtgcctggcctatgattacaactttattatagtgaaaggatacatatttcaactagccacaggaagagacacatagaatgaagtctgagagaagtttggtgtacagtatgagatttagtgggtcaagtttaattatcaatactgctacggatatccaagttaatccagtgttatgtaatgaaaagtaaattctttccccccagttatattccaattctacccgcctctcatcacctttcctgataccatcctgatcctaaccatggttatgttacttagatgtttataataacctaatttgtctgtttgtgtagctttcagggcgttcacaacagcatagccacagtgatttagatgatatcactccaagaaaatttgagcaacaaataaagtggtattggattataacccgaagtataaaataaatatccatgcattcatactgatatgactatattatcagataaataactaaataaatggagaagagataaatctccagtacagaattctaaataatttatgtagatattctgccttcaggaaagtggagcataaccccgctccttaagtacgtgctgtgcatagtgacttccaaagatgactgtatgggaaaagggagaaaagactaaatttacactggagaaacttgacaaacactccctcactcaggtgatcaagaccaacaaaaagtcatcatgctgatagtatgaatctttgatatctatgaggaaaatggcactttacctctgtgatcttcctcctgcaaacaacctcagtctaatcatgagaaaaacatcagtcagatcttagcggaggaacattctacgctatactgacctcctcaaaatagttaaggtcatttaaaatgaggaagagggccaggcccgctggctcatgcctataatcccagcactttgggaggccgaggagggtggatcacctgaggtcaggagttcgagaccagcctggccaaca[140 bp omitted]cggtgaaaccccgtctctactaaaaaaaaaaaatacaaaaaattagccgggcgtggtggtgggcgcctgtaatcccagctactcgggaggctgaggcaggagaatggcatgaacccaagaggcggagcttgcagtgagccgggatagcgccactgcagtccagcttgggcgaaagagtgagactccgtctcaaaaaaaaaaaaaaaaaaaattagctgggggtggtggtgggtgcctgtaatcccagctactcgggaggctgaggcaggagatccacttgaacccgggattcactgcagagattgcagtgagctgagaccgcaccattgcactccagcctgagcaacgagcaaaactccatctcaaaaaacaccaccaccaccaccaccaccaccaacaacaacaaaaaaaacaaggaagaaactgtcacagccaacagtaacctaaggggaaatgatgactaaatgcaatgtgttctcctgcttagaatgctggaacagaaaaaggaagaaaagcttaaaaacctaagaacatttggaataaagtgtaagctttagctaataataatgtaccaatacttgttaattaattgtaacaaatgtaccatataatgtaagatgtttttagtagtaggggaaactaggtgtagggtatatgggaattctctctattgcttttataattattctgtaaatctaaaaactgttctaaaacaaattatatattttacaatagagaatgaagctgagtattcaaattatttataaatagtcattcctgtgtatccacagagccggatttatcatgatttgagtaatgttattacatggagtcatttacatctatgatattagatccatgttttacaaaaggaacacacgtagagcccagaccactgtttcctgacatgctaggctaaaagtcaagattcgagactcagaatcattttggtcctcttcaacattttactccatctaatggcacactctacttattgggtctcctgaactctagagccagtaacagtgatcctaaagtcattctcatgattttgcctgaggtacaatttaaattcttggatgactccaaatctgcagaaatattaatctagaaaaaataatagttatgtgtacaggaaaaactgtaaattttactacatgtgaaaaagatttctgcttattaaaaaataccaaagaggccaaaagattaggaaaagttactgaaacaacatatgacaaacactaaccttaatatataaagaaatatatatatttcttaaatatgtaaagaaatttgtaatcagtaaagatgaccaacaacgtgatggtgaaacagaagagtttatagtaacatgaacatgcctgttaaacatttgaataaatgatcagtttctcataacatagaaatagaaatgaaattataaattgtgctgtcttgtttgatcaaaagtttgataaaacatttaatagtatacatattccagggaagatgtttcctgttctatctcccaacacatacagtgttattaccacaatatagtgtcaaaccgtcaatgcaaaaatctttaatctccttgccctgatgatatctgtctctacaatatccagtactcccacgtcaataaaatttatacacccattttctgttcccacctaccacactaaattcttgtgatctttctactctgcactctgaaatccacagtaacttattagcataatgcccccaccttttaaaaaagcattcttaatttgccttttattgtttcttaattataggtttaggaagttacaagggcagttgtgttacatacacatatagtgtagtggggaaagtgttggcttttaatggactcattacctaaataatgtaccttgtactaaataggattttttttggtttttttttgagatggagtctggctttgttgctcccccggctggagtgcaatggcataatctcggctcactgcaacctccacctcccacattcaagcaatttgctctgttgcccaggctggagtgcaatggcactatctcagctcactgcaacctccgcttctcaggttcaagtaattctcctgcctcagcctcccaagtagctgggactacagtgcctgccaccatgcccagccaatttttctatttttagtagagacagggtttcgccatgtcagccagactggtctcaaactcttgacatcatgtgatctgcccgccttggccttgcaaagtgctgggattacaggtgtgagtgcctggcttatttttaattctgtgtatgtgatgaatcatgtattgagttgcatatgttgagccatccttacaccccaggaataaaatccacttgactgtgctgttactatcttttttatgtactgtttgatttggtttgctagtattttgctgaagatttttgtgtctattttcatcagggatattggcttgtagtttttttgtgtgttttatccttgcctggcttcagtatcaggatgatactggctttgtagaatgagttagggaggattccctcctataatttttggaatagtttcaatagtgctgttactagttcttccttgcatgtctagtagaattcagctgtgaatctgtctggtcctgggctttttgtttttgcaagatttttttctattactgattcaatttcaatactcagtagtctgttgaggattcctatttctccctggttcaatcttggaaggttatgtgtttctaggaatttatccacttcctctaggttttctaatatgtgcatatagtttctgctgatattttatatgtctgtgttatcagttataatatcaccttatcatttctgattgtatttatttgaatcttctttttttcttggttaatctagctagtggtctgtcagttttatctttgcaaagaaccaactttttcttttattgatcttttgcattcctttgttctcagtctcatttttgcctgctctgatatttgttattgcttttcttctgccagctttgggttgagtttgttttgttttttcctagttccttgagatgtgacgttaggctattcatttgagatttttctatctttttggtgtaggcatttaatgctataaaatcctctcttagcactgcttttgctgtatctcagatgttttcatgtgttttgtctctattttcatttatttcaaaaaattttaaatttccaccttagtttcatcattgatccaaaaatcattcaggagcaagctgtttaaattccatgtatctgttttgagagttcctcttggtattgatatctagttttattccactatggtcagagaagatgttagatatgattttgtttttttaaaatttattgatacttgctttgtggtccagtatatgacctatttttgagaatgttccatgcacagaagagaagagtatatattctgtggttgttgggtagaatgttcttcagatgtctgttgggtccatttggtgtagagtccaatttaagtccagagtttctttgttgatttctgtcccagtgatctgtctagtgctgtcaatggagtggtgaagtcccctgctattgttgtattgctgtctatctcttttcttaggtctagtagtatctgtgttatggatctgggtgttgcagtgttgggtgcatacatatttaggattgttttatcttcttgttgaatttatcctttatcattataaatgaccttctttgtcctttttaatttttgttggtataaagtctgttttggccatcacggtggctcacgtctgtaatcccagcactttgggaggctgaggcgggcagatcacttgaagtcaggagttcaagaccagcctggccaacatggtgaaaccccgtcgctactaaaaatacaaaaaaaaaaaaaaaaaaaattagccgggcatggtggcgcatgcctgtaatcccaactacttgagaggctgaggcacaagaatcgcttgaactcaggagctggaggttgcagtgagctgagatcacaccactgcactccagcctgggcaacagagcgagactctgtctcaaaataaaataaaataaaataaatttgactaacaacttatgtataaaaggaaattacaaatatattagacaaaatcattctaacagggtattatgggttgaactgtatcccctaaaaagatatgctgaagtcctaacccctggtaccggtaaatgtgaccttacttggaaacagggtcttggcagatataatcaagttaagatgaggtcaccaggtaaccccaatctaacctgactggtgtccaaataaaagacatacacagagatacacagcgagaatgcaatgtgaagatggaggcagagattggaatggtgtatgtaaaagccatggaatgccaaggactgccagctgttaacagaggttaggaaaaaggcatagaacagatcctcagagtcctcagaaggaaccaaaacgatcagcacccttgagtttagatttccaggctctaaactatgagagaataaatttctcttgttttaagccaccaaggttttggtacttggtactttgttatcgtatcgtttaaaaacgaatacataggagaacctttgataatatgtatcctaatttgttctccttacctgttttaaaaaaattattataaaggttaacaaaatggtcttactttactgtcattcaaccagtatgaattccctcatggcgaatgaggtcagagcgactaccaaaagcctttccacattccttacagtcatagggtttctcaccagtgtgaattctctgatgtcgagtaagatttgagcctttattaaaggccttcccacattcattacattcatatggtttttcatctgtatggattctctgatgttgaataagttctgagctctgaataaaggcctttctacattcttcacattcatagagcttctcaccagcatgaattctgtgatggttagtaagtgttgaggcactattaaaggccttcccacactgcttacattcataaggtttctcaccagtatgcattctctgatgctgaataagccttgagtgttgagtaaaggctttcccacattctttacattcataaggtttctcaccagtatgaattctcagatgtagaaaaagttgtgaacttttagtaaaggcttttccacatactttacattcatagggtttctcaccagtgtgaattctctgatgatcattaaggtttgagcaatacttaaaggcttttccacattccttacattcatagggtttctcaccagtgtgaatcctctgatgttgagaaaaatatgaactacaactaaaagccttgccacattccttacattcatagggttttttaccagtgtgaatcctctgatgtcgagtaacgagtgagccacgactaaaggacttcccatactccttagattcatagtgtttttcaccaaaatgaattctctgatgttggataaattgtgagttttgattaaaggtctttccacatatcttacattcccatggtttctcttcactcatagttttttgaggtggaataagaaatgtgggctgaataaaagtagacatgtcttcacgggtaattattacttgactgaaatgtctcttctttagagataatattttggtctcacacattgattccagatctgaaagaaaatacaaaggcaaataaattttcctattctgggcaagttaaaacttctaaaaaagaaatgggagaattaaactgaaaagaatatctgagaaattacacagttttcaaaggtggagaggcaatctgtaaaactgacaagaaaagcacagacattaggagaggtaataaaagaagctgaggatgtggattcagaaagtagatgacctctatgatcctcaaattttggtctgaaccagagtcaccttaagccttggtgaatacacagtgttcagcaccatcctccatattatagagagattctaattaaaaaaaaaaaattttttttgcccccaccccagatcccccacaggcgctgcctgagacccagctctgtgtctcctcgtcgtacagcttgtggagctccgactgcaaggccatcagcatgcccaggcaggggttaagctggagggccatggaggaggacaggccagcaggatgccgcttctgctccagggcatgcaccatgcgtgagatattctaattatatacacgttcataaacatatgctcacatgcacagagtatgatactgtatgttttgcaattcgtagataactgtcagacctacatgaaaggactgttaagaataacaaatgtgttgaaaggtttaaatgtcgggggcgggtggagttcagtgactgtgcaatggtatactggcaaatcaccagcctccgacaaatctaatatgctgaacacaactggtgggaagagtagacaggtacatctcttctgtgcatacagcatgatatgggctaggaactcactgaaaataatttgctctggaattctgtgatgttgaccttgggagaaagaaatgaataattcaagtcatagcagtgattgagaaggaaggtggctcaagtttgagacacaagagagttaagataggatgaaatgtactctatgagaagaatggaactccatgtcaacatataaacagtgagccccagttctatgctttaaggcaacctctgagccctcttttccttgtttattaaaatgggactgacacttaacttatgattgctaaaaagatgaggaataacgtatataaataatctgatataaagtaagcactcagtattggtagctattattatgaaaaaatgtcatagcaaaaacagatattgggcaaataaaatggcttgaagacatcaaaataaagccagctagactatcttaagtattccctccacacaatcattggccaaacttagtctgggtgagtccctaaaaatctcttaaagttgtcctcatttaattactgaatcccctctttcctagaccactacaggaatctcctaatggtttccccagtatgttctagcaccctctaatccattcagcacctggtgtgatatttggtctcactttgccctcctgaaaatctaaactccttggtaattaccaagaagactccaataatgaggctcttgcctacctctacaaccttgtgttatactccacttccacttgctcaagaagccccagtccttcaagcacctcaagttctccctgcccctcagggccttcccacatggatctcccctttacctggcatacccctcatcctatcaccattgttggccctgctaacaatgagaaaagcctcatcacagcttccactaacaaccaagccctaagccactgaggaactcacagacactgctgacactgattgcagccagagaaatcatatggagattataccactgcatccacctataacaaagccaaagcaacctacccaaccaacactataaatacatctacaggaaaaaggttttccttatgaaaacaaatccataaaattggaaaaaatgaccataacaagaaatacacagatatcaatgtaaggataaaagaaacacgaaaaagcatggaaccatgacatctccaaagtaatacaataatgctccagcaacagattccaacaaacaagaaatctatcaagtgcctgaaaaagaattcaaaataatgatattaaagaagctcagtgggaaacaatagaacatggataaaaaccaaaagaatcagaaaaaacaattcatgatctgaatgagaaattcagcagatagatatcatgaaaaagaaccaaacagaagtcctgaaactgacaaatttcaatgaatgaaataaaaaacacaattgagagcttcaacaatagactagatcaagcagaagaaagaatttctgaacttgaggacagggttttttaaaagaatccaggaagaaaaagtaaaaaataataatttttaaaactgaaaaaagcttagatgacatatgggacatcataaagcaaccaaatattcaaattttgggtattctaggagaagagatgggcaaaggcataaaaacctatttaacaaaataactgaaaactttccaagtcttgtaagcaatatagacatcctgatacagaaggctcaatgatgcccaaatagattcaatccaaaaaggttttccaaggcccattacagtcaaactgtcaaaagtcaaagacagagaattctaaaaaaagcaagagaaaggcatcaagtcacatataagggaaccctcaggcgtcaagtcacatacaagggaaccctcatcagaactagtagcagataccttggcagaaaccttccatgccaggaaagaatgggatgatatattcaaagtgctaaaaaaacactgtcagccaagaatactgtacctagcaaagccatccttcaaaaatgaaggagaaagtttttcccagagaaaatgtatcacaactagggtggcccgatcaaaaatggcaaagggtgtcctacatctggaagtaaaagacatatctaccatcattaaacaaatgaaaataagaagctcactggtagagcagatacacaaatggaaagagaaaggactcagatgtaaccattacataaaaccaccaaaccaaatgataagaggaaagaaaaaggatataaaacaaccataaaaaattaacagattaggaataaatcctcacctattaataataaccttgaatgtaaacagtcaaattccccacttaaaagatacagtctggttgaatggataaaataaatatgactcacctatatactggctgtgagaaactcactttatatataaaatcatagactgaaagtgaagagatgaaaaaaaaatactgcacacaaacaaaccaaaagcaagtgagagtagccatacttaaataaaacagacattaagtaaaaaactgcaaaagaagcaaagaaggtcattatataatgataaatgggtcaattcagccagaggatataaagttctaaatttataggcactcaacactgcagcacccagatatataagcaaatattattagatctaaaaagagagatagggctgggcatggtggctcatgcctgtaatcccaacactttgggaggccaaggcgggaggatcacttgaggtcaggagttcgagaccagccttcccaacatgacgaaaccctgtct[131 bp omitted]gaaacctcgtctctactaaaaatacaaaaaattagccaggcatggtggcaggcacctgtagtcccacctactcgggaggctgaggcaggagaatggtgtgaacctgggagacggagcctgaagtgagccgggttcgcaccactgcactccagcttgggtgacagagcaagactgtcaaaaaaaaaaaaagaaagaaaaaaaaattagctgggcgtggtggcatgcacctgtaatccgagctactcaggaggctgaggcaggagaattgcttgaacctgggaggcagaggttgcagtgagccaatattgtgccactgcactccagcctgggcgacggaactagactctgtctcaaaaaaacaacaacaaaaaaaggtagactcccataaaataatagtacgggatttgaacatcccactctcagcattagacagttcatctagatagaaaatcaacagctttggatttaaactggatattagaccaaatggacctaccagacactaactgaacattttatccaacagctgcagaatacacattgttcctatcagcacatggaacatcctccaggaagagaccatacgttaggccataagacaagttataactaatttttaaaaattgaaatcatatcaagtatcttctcagactacactagaataaaactagaaatcaataacaaaaactttgtaaaccacacaaataaatggaaatttaaacaatgtgcttgctcatgaatgcccattgggtcaattaagaaattaaagatcatcaaagactactacaggcaactatatgctaacaaatcagataacctagaggaaacagaaaaattcctggatacatgaaaacctaccaagactgaaccaggaagaaacagagcagaagaacctgagcagaccaataacgagtaatgagattgaagcaatagtaaaatgtctcccaacaaaaaaagcccaagactaaagggctttactgctgaatcctaccaaaattacaaataactaacctcagtttttctcaaactattccaaaaaatggaagagaagttaattcttcctaatccattctacaaggccagcattaccctgataccaaaaccagagaaggacacaacaacaacaacaaaaagaggtgatatccctcatgaacatagacacaaaacccctcaatgaaatactagcaaatgaaatccaataatacaacaacaagataatatacaacgattaagtgagatttttcctgaaaagtgcaaggatggctcaacataagcaaatcaataaacatgatgtatcagatcaacaggatgagggataaaaaccatatgatcagctcaatagatgcagagaaacatctgataaacttcaacgtctcttcattataaaaacctctcaacgattaggcattaaaaaacataacataataaagaccatatatgacaaacgtacagctaacaccatactgaatggggaaaagccgaaagcttttcctctaagaactggaacaagataaagaagcccacattcaccactattattcaatatagtactggaagtcctatccagagcaatcaggcaagagaaagaaataaaaggcatccagattggataatagaaagtcacactgtccctttacagatgacatgatcttacatatatttaaaaacctaaagatgccaccagaaattcttggaactgatcaatgaaatcagtaaagttgcaagatacaaaatcaatatacaaaaataagtagtacgctgggcacggtggctcacgcctataatcccagcagtttggaaggccgaggtgggtggatcacttgaggtcacgagtttgagaccagcctggccaacatggtgaaaccttgtcttgactaaaaatacaaaaattggccaggtgtggtggcaggcacctgtggtcccacctacgtgggaggctgaggcagaactgcttgaacccaggaggtggaagctgcagagagctgagatcatgccattgcactcctccagcctgggagacagagcaaaactctgtctcaaaaagggaaaaaaaaaggatttctatacatccacaataatgaattagctgaaaaagaaatcaagaaaacaatcccatttattaatataatagctacaaaaaacaacctagaaataaatttaaccatgaagtgaaagacctctgtaaggaaaactacaaaacacagacaaaagaaattgaagacaacaaacaaataaaaagatatttgcatgcttatgcactggaagaactattgttaaaatgaacatacttcccaaagcaatctacagattcaatgcaatctacagattcaatgcaatcccgactgaaatgccagtcagtttttacatgaacaggaaaaaaaatcctaaaatttgtaggaaaccataaaaaatgccaaatagccaatgcaatctgtagcgaaagaacaaaagtggaagaatcaaacttcaaaatatactacaaagctgtcgtaaccaaaacagcatggtactgtcataaaaatagacccaaagaccaatggaacagaagagagaacccacaaataaatccatgtatttatagtcaactgatggttgacaaaggtgccaagaacagacatagggaaaaggacacgctgttcaataaatggtgctgggaaaactggttatccatatagtgaagaatgaaactagactgtatctctcaccatatacaaaaataaactcaaaatgaattaaatacttaactataagaccccaaattataaaactactgcaggaaaacataggggaaacacttcagaagaataggcaaatatattttagataagacctcaaagatattttcaataaggggcaacaacaaaaaaatagacaaattggactatattgaactaaaatgcttctgcacagcaaaggaaacaatcagcagagtgaagagacctgtagaatgggagaaaatatttgcaaactcttcacctgagaagggactaatatccagaattaacaaggaagcaaaaaaacttaatagcagtgccatagcggctcataactgtaatcccagcacattgggaggccaagtcaggaggatcacttgaggccaggagttcaagaccagcctggggaacatagggagaccccccccgatctctataaacagttttaaaattagctaggtatagtggcatgcacctgcagtcttagctacttaggaggctgaggtggtagaatcacttgagcctgggagttcaaggatgcggtgagctgtgatcaggccactgcactccagtctggctgacagtgaaactctctcacatacacaaaaaatgacactgggtacattctattagtaaaagaaaaaaaaatacatatatatatatgtatgtataaaacaattgataaatattcaaagtgatgggtatctaaataccttgatttgatccttatacgttgtatgaatgtatcaatatattgcttgtgctccataaatatgtataatttgtatcgataaaaactaaaaaaaaagctcatgagaaatctaatgtatagcaggaggactatagttagtaatactctattgtatactagaaatttgtcaggaaagtaggttttaagtactcttaccctaaacaaaaaaaaaaagaaagaagaaaagattatagttatttgataggatctgcttaactatagtaattatttcaatatgtatgtgtatcaaaacatcatgttgtacacctagaatttatacaataatttttaaaaaaaggttcatataaaaatttttttttaaacacatataaaaatagaaagaatgagtaacacttagtatttgctagcaaaacagggtgactgtagtcaaaaataatttaattgaacatttaaaaataactaaaagaggctgggcatggtggctcatgtctgtaatcccagcactttgggaggccaaggtgggtggatcacttgaggtccggagttcaagaccagcctggccaacatggtaaaactctgtctctactaaacacacacacacacacacacacacacacacacacacacacacacacacacacaaatttgctgggcgtggtggtatgtgcctgtagtccaaactacttgggaggctgaggcatgagaatcacttgaacctgggaggcagaagttgcagtgagcagagatcacagcactgcagcactgcacttcagcctgggtgacagagtgagactctgtcttaaaaaaaaaaaaaaaaattcccctaaaaactaagagtacaataagattgtaacacaaaggataaatgcttcaggtgatagatatcccatttctcctgatataagcattgcctgcctgtatcaaaatctcatgtaacccataaatatacatacctactatgtacccaaaaaattaaaaataaagattaataaataaataaaaacaaccaggccaagtgtggtggctcactcctgtaatcccagcactttggagggctgaggcaggtggatcacttgaaatcaggagttcaagaccagcctggccaacatgttgaaacctcatctctactaaaaatacaaaaattagctgggtgtggtggcatgagcatgtaatcccagctacgcaggaggctgaggcaagggaattgcttgaacccaggaggtggaggttgcagtaagccaagattgtgccattgcactccagactgggcaacagagcgagactgtctcagaaaaaaaaaaaaaaaaaaaagataacaagtgttagcaaatgatgtggagaaactggaaccatcatacactgctggtgggcatgtaaaatggtgcagccaatttggaaaagagtctagcagttcctcaactggctaaacacagagttatgatatgacccagcaattctactcctaggtagaaacctgaaagaactgaaagcttatgtccacacaaaaacttatagacatgttcatacaacattaatcaaaatagcccaaaagaggaaacccaaatgtccatcaactgatcaatggataaatgtgctatatccataaaatggaatagtatttggcaataaaaaggaatgaaatgctgatacatgctacaacacggatgaaccctgaaaagcattaagttatgaaatagggaatttgcagaagaccacatattgtacaattccatttatatgaaatgtccagaataggcaaatccatagagaaaatcaactcatggttgcctggggctggagggggtgggaataacagctagagtgtacagggatttttctgaggtgataaaaatgttctaaaattgattatggtgatggttatacaactctattacattaaaaatcactgaattgtacattttatgtgggtgaactatatggtatgtgaattataccttaataaagctgaaaataaaacaacaaaattaaaggagtgctactctggttcatagcgagcaggggttgggcaactttttaaataaagaataagatagcaaatattttcagctttgtgggctatccaagtgtgtgattgtagtgcaaagacagtcacagaaaacttctagtagtttgaatgtgctagccttaaaaaataaacaagtctttccaacttggatccggcagaatggctcccacaaagaagggtggtgagaagaaaaagggccgttctgccatccacaaggtggtgacctgagaatacaccatcagtatgcacaagcgcatccatggagtgggcttcaagaagcgtgcccctcggacactcaaagagattcagaaatttgccatgaaggagatgggaactccagatgtgcgcactgataccaggctcaacaaagctgtctgggccaaaggaataaggaatgtcccataacgaatccatgtgcggttgtccagaatacgtaatggggatgaagattcaccaaataaactctatactttggttatctatgtatctgttaccactttcaaaaatctacagacagtcaatgtggatgagaactaatcactgattgtcaaatacatcaaatagttataaaattgcaaaaaaaaaagaaaaaaaaaaacaagtacccccccgcaccccgcaaaaataaccccacaacctcacaagaactgctagctcaaaaacagaaatttttaaaaagactggcttaataattctggtttaaaaatagctatacatcttcctcctgattt[136 bp omitted]catggcaaaatcccatctctacaaaaaatacaaaaattagccggtcatggtgccgtgcacctgtagtcccagctactagggagactgaggtgggagggtcacttaagcctgggagaggcgggtgtggtggaggttgtagtgagccaagatgcaccactgcactccagcctgggcaacagagccagactctgtctcaaaataaaataaaataaaataaaataaaataataaaaactatacaattatgtgttaaaccaaatcaaattatagttctgtcagactttttgacatccaagtaactgttgggccgggtgcagtggctcacgcctataatcccagcactttgggaggccaaggcgggtggattacttgaggtgaggagttagagaccaacctgggcaacatggtgaaaccccgtctctactaaaaatacaaaaattagctggacatggtggcgcacgcctgtaatcccagctacttgggaagctgaggcaggagaatcgcttgaacccgggaggcggaggttgtagtgagccgagatcacgccattgcactccagcctgggcgacagagcgaatctccatctcaaaaataaaaaagaagaagaagaaaaaaagtaactgtgttgctctgtagtgtgtcagtttaaatacagtagtcaagatttttagtcaacttcaagaaaatggacattaagtaagaaaaattaatagataatcctcgaaaacctggatgatttctaacataaggtattaaaacattgatttctaagaatagttttaacaaatatgccattattatttaatatgtatgccttgttttttatgttagaggatggctatacctttgggtaatataaataaatacatgtggttttgttttgttttgtttttgggtcaagggtaattttagttatagtatgtgcagggcacaaatgtgcaaaagggcatttctgtcctttttataaaggcttataaggaatgtgggtggctattgggggagtggtatcacatgtcaggagtctgttaaaatgtttatatatcacagttctcaattacctacctcccacatctttctttataatttgagtagttgagactatctgggaataatcataacagaaatgtaatagatatgcttttgttatcaaggaaattataggttgggcacggcggctcagacctgtaatcccagcactttgggaggccaaggtgggtggaacacctgaagtcaggaattcgagaccatcctggccaacatggggaaacctcgtctctactaaaaataaaaaaattagccgggcatggtggcaggtgcctctaatcccagctactcgggaggctgaagcagaggttgcagtgagctgaggttgcaccactgcactccagcctgggcaacaagagtaaaactgtctcgaaaaaaaaaataacaatagttttgtcttaaaaaaaccaattgttccaaaatgtaaaactgatacataaaaaagacatctcagttttgatgggtttattttcaatccagtatttgaacttgggaagaatatgtaaaaacactcctaagtgactattattaagcaaagatatgaaaatagaaagtacaaactacaatacaaataaacataaggcataacaccaatggggatgcacattaagtaggtaacaggaaagttataacaacatttgtgtaatcaggatataaactatgaatatattgctataggcaagatacatacagtgattacgagagaccagccctcaactatcagaaaaagacatcaagaaatacttttatagtttgatgtatcacagaaagacaaaacatactatgcaaaatttgaaggtaggtatcagaagaatgaaagtaagagttgaaaatgtattatctttgatgagagggactggggcagtcatggtaggaatgtatatgtgaaaaagcaggctgctgtttttcttttttctctttttttgagatggagtcttgctctgttgcccaggctggagtgcagttgcatgatctcagctcactgcaacttccacctcctgggttcaagcgattctcctgccttggcctcccaagtagctgggactacgggcgcctgccactatgcccggttaatttttgtatttttagtagagacggggttttgccatgttggccaggctggtttcgaactcctgacctcaagtgatctgcccgcctcggcctcccaggtgctgggtttacaggtgtgagccaccgcgcctggtctgggctgctgtttttcaatataagctttataacactgtgatttcaaactctgtaaatatattactttaatgaaaattaattattttaaaatgaaaaaggaataaacagagaccacctttcaagtacaaaggtacaaggttaaggtaagattaagaagggggtgaattagcaagttggtagggaggaaaagtggtaggagagacagaaataaaaatacttgaaggcagctaagatcaactgatagctgggaaaaagtgaagattcacaaactcctccctaggttcctagagctttgttaaatctagaattctttctcaagggacacatggatcttctatttccaacgctaactccataggtaacaacatctacttctagggctccaaccattaacttctacttggatcaatttccacttccatattttttgactgttttacaactttcttctgagcgtcctatttgatcttctcattgatgaatcttatcctgtagaaattatttacagcaatgttctagctcctacattagataacaagtttcttaataagcctacacattttctaaactgtacagcacctagcagactagtgtataaaattaaaaagtcaaacatttttataagacttgctatttaaaaatcttaattctccacaaactgatattaatattctcatgaaaaaataacttggcattttgattaagtttcaaatgactatataagctaattctaaattttttttttttttcttttgtgagaccaagttttgctcttgtcccccaggctggagtgcaatggtgtgatctcggctcactgcaacctccgcctccctggttcaagcgattctcctgcctcagcctcctgagtagctgggattacaggtgcccgccaccacacctggctaatttttgtatttttagtaaagatggggtttcaccatg[136 bp omitted]agcagcaggagaacttgctctactagataagatttattacatgctacagtattaatatagtgtggtattggcacaaggatagacaaataagccaaaggaacagaattcagagatagactcacagaaataggaatacctgatttatgacaaaggtagtcctatttctattggggaaaagatagatatagtcctatctctatagaatgggaaaaggacagtcatctcaataaacactaagaagtcaactggatattcacatggaaaaaaaatgaaatttgacccctacctcacaacacatacaaataccaacttcaggaaagtagatctaaatggaaaaagtaaaacaataaagctactagaatataacataggaaatatcttcaagaccttggggtaggcaatgattcctatccaggacacaaaaaagcaacactataaagaaaaagataactgtgaccacattaaaattaataacttctgttcatcaaaaggtactattaaaagagtaaagggcaaggtataaagtggtgggagatatttacatcatgtataaccaaacacagggctgatacatagaatataataagaattctttgaaaccaacaggaaaaagatagacaaccgactaagtttagccaagaaacttaaacaggcatgtcacagaacacacacatcagaataactaaaattaaagggcctggcaataataactggtaagaatgtaagaatgcagagcaatagtaaccttcatactgctagtagaactgcaaattggtataactactttggaaaattggtatatttactaaagttgaacacacacatatcctattgctcagtaattccactcctatgtatatacctaaaagaaatgtgtacatacatttaccaaaagttatacacaggaacgttcacagcagcattatgtttaatagctaaaaactgcaaacaaaccaactgtcaacagaaggacacttatagtaattaataatatat[133 bp omitted]ttgaaaccctgtctctactaaaaatacaaaaaattagctgggcgtggtggcgcaggcctgtagttccagctactcgggaggctgagacaggagaatcgcttgaacccaggaggcagaggttgcagtgagctgagatcacaccactgcactccagcctgggcaacagagcaagactccatctcaaaaaaaaaaaaaaaaaaaaaaaatgtatatatatatatatatgtatatattcatagaatgaaatataacatagccaataagaatgaactaacaccagatatatgcagcaccatagatatgtcacataaacataatgttgagcaaaaaaagccaaaggcaaaagactaaatactgtgtgattgcgtctatacaaagttcaaaaataggcaaaacgaatccatggtgccaaatgtcaggatggtatttattttgagagaggaaaaagaggctggtgattgggaaggggcagagaaggggttctga
